United States Patent Application Publication US 2022/0008368 A1 - sequence listing, part 3

SEQ ID NO: 2 - DNA, 58617616 bp, Homo sapiens (residues 4,342,047-6,513,069 of 58,617,616)
  modified_base (1)..(60000): a, c, t, g, unknown or other
  modified_base (24448981)..(24498980): a, c, t, g, unknown or other
  modified_base (24552653)..(24552752): a, c, t, g, unknown or other
  modified_base (24891257)..(24891356): a, c, t, g, unknown or other
  modified_base (24895791)..(24895890): a, c, t, g, unknown or other
  modified_base (24898314)..(24904771): a, c, t, g, unknown or other
  modified_base (24908590)..(24908689): a, c, t, g, unknown or other
  modified_base (27190875)..(27240874): a, c, t, g, unknown or other
  modified_base (58607617)..(58617616): a, c, t, g, unknown or other
aaaaaaaagaaaaaagaaaagaaaagaaaacaaaataataatatgggagggaggtggtaataggtgcattttagaaagagccctctggggcaatggtggaagaccgacagggtggggcatgagtttggaggcctgagactcactgcgatggccaggatttgggtgcaagaggctggaggtgtggctcagggttttggaaggcaggggacggaaaaaaagccaaagagaaagtgcgtaaggagttggggaaataaactgaggccggtttgggctatgctgagtctgcaggccttggggatgcccgttgttggctggacagtcagggtggggcccctaaagggtgcctgggctggacaacaatagttcacatgtacccagctcttgctctatgtcaagtcttcttcctgagaacattcccgagcaccctggagagcctcccccgcacccctactgtccagttcccacttcccgactgcggtctgggcaaagccacccgcacttgagcccatcccacggcgtcccggagctttaggaagtccccatcccggactttcaaccctgccagggactgagggaaatcccagagcctgggctccgggacgaaggtcccaggacagggtcggggatgtagttgcagaaacagggtaggggacaaaggccggggctgcactgatcaggcgcgcaacgagcccggccctgcctcctgctccgcccaagggtatggagggccggactcggctggccttatacccggagctgattggctggtgagtccagtccctgcctctgatggtttgcgctcataactaagggtttctactgattggtttacatggacgtctgcccattggtcaaatccgagttggtgtaatcagatagttgacacggattggttggtgcgggaatccagtagcttgctatcgattggttgagggtgaaataaatgggactcttatcattggctggcgggctccgcaacggtccaatcatggaatcagtcgagggccgcccgggagggtgggagttaattctttagcgactgaggccggcttgggctctttggctccacctgtgtctgcgcgaggctgttccctattggagtccgcattgttcccctggacctgagtttctcccctggtcctaaaggccgaggcctctgagttcctcaagtgcggtgaccgcaggtctcaccttctcctctccttgcagcaggctgagccactcgcgcacccgccccaggcttccaccttgcaacctctatccctggacagcgaggcctcagtttccccattcgcaccaatgagctcccggtcaacaccccgtcacgcctcagtttcccgaatgttcccagagggctgagttcccgatctctctcccgcgtgggcatccccgaggcctcagtttctccgcccaccccagcgcgccgagcccttcccccgaccccggcgacggccaatggttggggcgcccctcccctccccggggcggggccgcgtgacgtgccgggaagccggagtctagagctccgggcgcggggaggcgcggccatggcaggtacggcgggcccagcggggcggaggcgcggggcgcggggctgcaggggcgcggggctgcagagccgtggggcgagcggcctccctgcagcctctcgctgtccgcagctccggagccgctgtccccggcgggcggtgcgggcgaggaggcgccggaggaggacgaggacgaagcggaggccgaggaccctgagcggccgaatgcgggagcgggcggtggacgcagtggcggcggcggcagtagcgtcagcggaggaggcggcggcggcggggccggggcggggggctgcggcgggcccgggggcgcgctcaccaggcgcgcggtcacactgcgggtgctcctcaaagacgcgctgctggagcctggcgccggggtgctgtccatctactacctggtgagcaccccgcctccctcgtcccatcgcggctcgggcaggaaggggaaactgaggcctggagttcccttgctgcaggacaagcttcagtgtagggaggggacactgaggcccggagctcccttgctgagagacgagccccggtgtggcgaggggaaactgaggcccggggctccgttgactgcaggaagagctccagtgtgaggaggggaaactgaggctcggagctctcttggctgcaggaagagccccgacatgaagaggggagactgaggcccggagctcccttggcggcaggaagagccccggtgtgaggaagggagactgaggcctggagagctcccttgctttaggacaagccccagtgtggggaggggaaactgaggcccagagctcctttcctgcaggaggagctcccgtggaggggacactgaggcccggagctctttttacgggacaagccccatgtggagagaggaatctgaggcacagatgggtccttctggtggggaggacgtagattaccaaacaccccatcccacaaaggagaagctgaggctcagagaggagccaccacccgcgcagggtcagatgggcaacaccccggccttcctgtggtttcccagccgtgaaatggaatatttccccaccatgggaaaattaggggatggttaaatgaataaagccctca[137 bp omitted]ctgcctcccggttcaagcgattttctgcctcagcctcccgagtagctgggactacaggtatgcgccaccacgcctggctaattttttttttttgcagttttagtagagacggggtttcactatattggccaggctggtcttgaactcctgacctcgtggtccgcctgc[140 bp omitted]tctgcctcccggttcaagcaattctcctgccttagcctcttgagtagctgggattacaggcacccgccaccacgcctggctaatttttatatttttagtagagatggggtttcaccatg[131 bp omitted]tgatttgtgaatggtagcacattattccccttctgaatgggagtttctgaatggagcaactgctgagtgttgcatcctggagacacagcagtgatcaagacagacagaccctatccccgatcttaggggtttcttggtcatggtgggcggggtgcagatatctgccaggcagcttggtgcaggctgatcaggtttgtgggtgtggactcccaggcactgaggaggccctgcagccggcctgagaggtgttcctggaagccctgtaaagacatgcctgagggagcgtaggtctggggaggaccccccgggagagagggcatggtgggtgttggtcctgggcccagccagctgactgtcactgcaggggaagaagttcctgggcgacctgcagccagacggaaggatcatgtggcaggagaccgggcagaccttcaactcacccagcgcctgggccacccactgcaagaagctggtgaaccctgccaagaagtcgggctgtggctgggcctctgtcaagtacaaaggccagaaactggacaagtacaaggccacctggctccggctgcaccagctgcacacgcctgccacggctgctgatgaggtacgtgctgcagcctcctccaggaagccgcccaggtcactgtggaatgaggggtgcccagcctggcacagctctctccggaggaggtattagtaatatatacaaacacggatggagcccttaccacgtgacatgcctcctccatccctccagggctggggcggagagaggggacatgggagcttgggctttgagggatgagcaggagtttgtcagagcaagttgaagggaagagctttctagaaggatggaatggcatacgcaaagtcatgtagacaagaagaaagacctgctggtgtcatgggtggctgagggggctggaaatgatggcagggaccagaggggcactgggggaacttcaaatgctatgataatagatgttccctgagtgttcaccagccgggtgaacttgaccaaggaccctttgtgtgccttagtttttttctttttttttgagacagggtctcactctgtggcccaggctggagtgcagtgcccccatcttggctcactacagccttcacctcctgggttcaagcgatcctcccacctcagcctccctagtagctggactacagacgcatgccaccacacccggctaatttttggatttttagaagagatgaggtttcaccatgttgcctaggctggtctcaaactcctggcctccagcaatcctcccacctggacttcccaaagtgttgggattgcgggcgtgagctactgcactggccgttttttttttcttatgtgaaatggagatggtaggccaggcacagtggctcatgcctgtaatcccagcattttgggaggctgaagcaggcaggttcacgaggtcaagagatccagaccagcctggccaacatggtgaaaccccgtctctactaaaaagacaaaaattagccaggcgtggtggtgcacgcctgtagtcccagctactcgggaggctgaggcaggagaatcacttgaacctgcaaggcggaggttgcagtgagctgagatcacaccactgcattccagcctggcaacagattgagactccatttcaaaacaacaacaacaaaaccccaaaatggagatggtaccagtgcccatgtgtggaatctgtagggcaggcaggaaactgaggcaggagcagatgctgtagtcttgtggcagaatcttttttttttttctgtttttgctgttatcgccttcaactgattggatgaggcccacctgtagtatcaagagtaatgtcctttcttcttttcgtagatatgttttttttttttttcaagacggagtcttgctctgtcgcccaggctggagtacagtggcacgatctcagctcactgcaagctctgcctcccgggttcatgccattctcctgcctc[133 bp omitted]ggcctcccaaagtgctgggattacaagtgtgagccaccgcgcccagctgcctgtagatatgttttcataaacttttttttatgtacgaagtttattgcatgaaggagttaacactagtccatgttaaaagcagaccacaaatggttacgttatacaagctgtgaggtttttaaacttgtgacaaaggacagaaaggaaattctactcattgcaaggaaatcctcacttaagcttcagtgagccacaagcacttaaaacccatgaacctgcccgacgcagtggcaaaaaaacccttgacccttcacatgatcctccttagtcagtccagtgtctacaaggaactggcaaatgttcttgcactggtcactctgtagctgaattacttctccatattgtgtttttttttgttttttttttttgagacagactctcgctgtgtctcccaggctggaatgcaatgccacgatctctgctcattgcaacctctgcctcccgggttcaaatgattctcctgcctcagtctcgcgagtagctgggattacaggcgcccaccaccacacccggctaatttttatatttttagtagagacggggtttcaccacgttggccaggctggtctcgaactcctgacatcaggtgatccgcccgcctccgcctcccaaaatgctgggattacaggcgtgagccaccaagcccagctgacttatccatattctggatgctcaattacagtatcattgcaggcaggcaaattgcaaatttcttttttttttttttttttttttttgagacggagtctcgctctgtcgcccaggctggagctcagtggcacaatctaggctcactgcaacctctgcctcccaggttcaagcgattctcctgcctgagcctcttgagtagctgggattacaggcacacaccaccacacccggctaatttttgtatttttagtagaaatggggtttcaccatgttggtccggctgttctcaaactcctgacctcgtgatccacccccatcggcctcccaaagtgctgagattataggcgtgagccatcgcgcccggcctaaatttcttcttaaacaccttcactagtttctttttatcgtaatcatcactgatctcttgcaggacagcagtaagcgttttcctgccatttttctgttgaattcttttttttttttgagatggagtctcactgtgtcgcccaggctggaatgcagtggtgcaatcttggctcactgcaaactctgcctcccggattcaagccattctcctacctcagcctccaagtagctggaattataggcgcccaccaccaggcctggctaatttttttatttttagtggagacggggtttcaccattttggccaggctggtcttgaactcctgacctcgtgatctacctgcctcagcctcccaaagtgctgggattataggcgtgagccaccatgcccggcctctgttgaattcttatatggatacagtcctcagtgccagcaggaagcaggtcatcactgttacttgcatcagcagaggggttgaaagagtggaggttctggatagtggacaaaagatataattctgtttttgagatggagtctcgctctgttgtccaggctggagtgcagtgctgtgatcttggctcactgcaacctcccgttcccgggttcacgcaattcttctgcgtcagcctccagagtagctgggactacaagggcgcgccaccaagctcagctgatttttgtatttttgcatgtttattagagatgcggtttcaccatgttggtcaggctggtctcgaactcctgacctcaagtgatccactcgcttcggtatcccaaagtgcagggattacaggcatgagccaccgcagccagtcacgattcctttgccttggtgggaactgcctgtggaaagcagtggtggcgggagaaggcgagtgggagggatggagcgtcaggaagtgagggtgctcaacgggaggctgccgagtcctcagtggctcagtgagtgggtctattttttttttttgagatggagtgtcgctcttgttgcccaggctggagcgcaatggcgtgatcttggctcactgcaacctccgcctcttgggttcaggcgattctcctgcctcagcctcctgagtagctgggactacagatgcccactaccatgcccagttaatttttgtatttttagtagagatggggtttcaccatgttggccaggctagtcttgaactcctgacctcaggtgatccgcccacctctgcctcccaaagtgctgggattgcaggcgtgagccagccatggagcctggtcaagagcaatgtcctttctgaaagtcaccttactgtagatatgaatcacatgtaacaaatgccatcgcagtaatgcctagatcagtgttccattaaattaccaggcactcttgcctagctaagatgacacaggaaaccattctttcagtatgtattcagttagtggccaactgtgtgcaaggcctgttttaggcactgaatataaagcagagggcaaaaaaagtcaaaaatccctgcctttgggtgggagttgtgggggaagaaggtggttgggggggcttcactgagaaggtgacatttgaacggagaactgaaggtggggagggagggagggtgccatgaggacttctgagaaacagcctctgcaaaggccctggggcacgaccgtgcctggtgtgttggaggaacagcgaggagcctgtgtggctggagccgagtgagtaagggagagagaaggaggtggggaggatgggaaggggacagggcaggtcatgcagggctctgtaggttatggggagaacttgggctttgaccgggaggaaggtgggagccatggagtgttgcaggcagaggaaggacaggatctgactgaggtgctcacaggcgttctctggtggctgctgtggggactagactgtcgggggttagggtgggatccagggaccagggcagaggtgagtgagctggtccaggtgagggatgatggagtggcccaggccgaccatggagcagggaagaagtgggcaggttccaggtatttttggaagtgtatccgccagatttgctgatagatcagatgctggagtcctgagcaagtgggtggatcgagctgccaaaattgggggatgtgggaagggcagatctgggggttcagtggggcccagcatggctgtgttgagtgtgaccctgtgagtcccccacatggagacatagagaggcagctgggccctgagtctggagccgggcgaggcttgggctggagacaggactgtgggcagtgtcaggtgtagacaggatttggagccctgagaggggatgaggccacctgggaggggtgtggagggaggaggcctgaaaacccagcctggggccagcaacagcgagaggggaggtgagagggagccaggcgagcgtgggatccgggggttgtgtgaggaccgtgtcctggtaggtaggaggctgtgctgggtcagatgctgccgagaaggtgacgaggacagaaagtgagatgtgacccagagaggtcacctccacaagggcagtttaggacagaactggaggagaggttatttttaatttgtatttttgtagacagagtctcgctccgtcacccaggctgtagtacaatggtgtgatctcagttcactgcagtctccgcctcccgggttcaagtgatcctcctgcctcagcctcctgagtagctgggattgcaggtgttcgccaccatgcctggctaatttttgtatttttagtagagatggggtttcaccatgttggccaggctggtctcgaactcctgacctcaagtggtccaccgcctcagcctcccaaagtgctgggattgcaggcgtgggccactgtgcccgactgggaggaaaggttactgaaagacgtgaaagccacctatgtatggtgctggctcgctcaatgaacggagcatctaggtgtatgctaaatgctttgtgcgtatgatttcatttcaccctgatgccatccccgtggagttggaggtcattgtgcccttttacagataagaatagacttggcggccgggcacggtggctcacgcctttaatcccagcactttgggtggccgagatgggcaaatcacaaggtcagacgatcgagaccatcctggctaacacggtgaaaccccatctctactaaaaatacaaaaaattagctgggcgtggtggcacatgcctataatcccagctactcgggaggctgaggcaggaaaatcacttgaacccgggaggtggagg[132 bp omitted]gggaggctgaggcaggtgggtcacttgaggtcaggagtttgagaccagcctggccaacatggcaaaacctcatctatactaaaaagacaaaaattagccaggcatggtggtgggcaactgtactcccagctactcaggaggctgaggcaagagaatggcttgaacccggaaggcagaggttgcagtgagccaagatcgtgccactgcgctccagcctgggtgacagagtgagaccgtgtctcaaagaaaaaaaaaaagataaaagaatagatagagttcagagagtttaaacccatttatgcctgaggttgcaattctttgaatttttgcaatcagaccttggcgatgactttgagcagtaggatataaatagctcccatatgcttagcgttccaataatggaaccctaggcataaatggcaatggtgctcaccaaaggt[134 bp omitted]agaaatcccgtctctactaagaatacaaaattagctggatgtggtggtgcatgcctgtaaccccagctactcaggaggctgaggcaggagagtcacttgaacccaggaggcagaagttgcagtgagccgaaatcacaccactgcactccagactgggcgacagagagagactccgtctcaaaaataaataaataaaaaataaattacaaataaataaaaaaaaatgtgaggtcttagcttaaggccttctctgctccctccctccctctagtggtcatgtggggcaatggcacttacggcttaggccaaagggctggggtgggatttagcagggagcgggggggcacccagctgagggtcccaccgctgtccctgacccctaacccctgcagagcccagccagtgaaggggaggaggaggagttgctgatggaagaggaggaggaggacgttctggcaggggtctcagcagaggacaagagtcggagaccactggggaagagcccttcagagcctgcccacccgggtgagaggcgtggggaggggaggcaggacaggggcggatacagctcgggttggggaggagactggggagaggttgggccttgatcttctcctagggcccccaagatggagacatggagagtcagctgggccctaagtctggagccggacgaggcctgggctgaagacagtcccactgcccagttttactcactgccttgacttcttaagctcaaatgctggattttattttattttatatatttatttattttttggtgatggagtctccctctgtcgcccaggctggaatgcagtggctcaatctcggctcactgcaacctctgcctcccgggttcaagcgattctcctgcctcagcctcccaaatagctgggactataggcgccagccgccacgcctggctaacttttgtatttttagtagagatggagtttcacaatgttgtccaggctggtcttgaactcctgacctcaggtgatccacctgcctcggcctcccaaagtgttgggattacaggcgtgagccactgtacctgtttttttgtttttttgagacagggttttgctctgtcccccagggcagagtacagtggtgcaatcatggctaactgcagcctcaacctcctgggttcaagtgatgctctcacctcagcctcttgagtaactgggaccacaggtgtgcaccaccacacccggctaatttttgtattttttttcagagacgagatctcatcatcttgcccaggctggtcttgaactcctggacttgagcaatcctctcacctcagcttcccagtgaaaaaaaatttcttctttgtaaataagagtctcactctgtaactcaggctggagtgcagtggtgtgatcacagctccctgcagcctcaacctcccatgctcaagcgatcctcctgcttcagcactgggattataggcatgcaccaccacacccagtggccacctaatttgttctaacttgggctggggagggactgaccctgcctttttctctcccagaggccacaaccccagggaagcgggtggacagcaagatccgggttccggtccgctactgcatgctgggcagccgcgacttggccaggtcagactcaccccaagttctgcccctgccccagctcacctggatctcttgctggtcttggggtagcaagggcaggggtggggggtgggacagagcctcagatcctcagagctgtggggttgggggagtcagtgtgggggcgagggaagagcctggggattcctgagactgtgcgaccctcctggcccctacaggaacccccacaccctggtggaagtaacatcctttgcagccatcaacaagttccagccgttcaacgtggctgtttctagcaacgtgctgttcctgctggtgtgtggcccaccctgtctaggggcaaggggctccggagcccagtcggtgggcagcgggcggggctcccctgcgtatcagctccatgagagctggggccttgtctgctttgtttgctactggtacactgtgggtgctcaataaatgtatgaaggagggtgcgtggccaggcccagtggctcacacctataatcccagcactttgggaagctgaggcagcgggtcacctgaactcaggagttcgagacaagcctgggtaacactgaaaccctgtctctactaaatatacaaaaattagctgggcatggtggtgcacgcctctaatcccagctacctgagaggctgagacaggagaatggcttgaactggggaggcggaggttgcggtgagccaagatcgtgccactgccctccagcctgggcgacagagcaagactgagtctcaaagagaatgagggcacaggctggctccagtgttggggcagggccacagcctgagccagtcttttgctgttcctcccttccccaggacttccacagtcacctgacacggagtgaggtcgtgggttacctggggggccgctgggacgtcaacagccagagtgggtatccagggccaggtgggcgggggcgttggaggaccggggtcacggggtcacagctgcccctccccacagtgctgacggtgctcagagccttcccttgtcggagccggctcggggacgcagagactgcagctgccatcgaagaggaggtgaggggctacctgggaggtggcattctggggagggttgggaagggacatagctgtcctggcgactgcccagtggctggcagtgtcatcacccagcaaccgtgcaggtgagcatgcccgtctgtgtgcttgggaccccatggtgaagggtgaagaacactgctttttttttttttttttgagacggagtctcgctctgtcacccaggctagagtgcagtggtgcgatctcagctccctgcaagctccgcctcccgggttcacgccattctcctgcctcagcctcctgaatagctgggactacaggtgcctgccaccacgcccagctaattttttgtgtttttagtagagacggggtttcaccg[138 bp omitted]ggtcaggatggtcttgatctctttacctcgtgatccgcccacctcagcctcccaaagtgttgggattacaggggtgagccaccgtgcctggtcaggatggtctcgatctcttgacctcgtgatctgcccacctcggtctcccaaagtgctgggattacaggtgtgagccactgcgcccggccttttttttttttttcttgagacattctcgctctgtcgcccaggatggagtgcagggcgcgatcttggctcactgcaacctccaccttccggattcaagtgattctcctgcctctgcctcctgaatacctaggattacaggtgtgcgccaccatctccagctaatttttgtatttttagttgagacagggtttcaccatgttggccaggctggtttcaaactcctgacctcgtgatccacccgcgtcagcctcccaaagtgctgggattacaggtgtgagccaccgcgcccagcctaagagcactgcttttggatctcctagccctggtgctgaaacctcgccagccccctcccctctcagagccttggtttccttgtctgtaaaatgagcggcttcaatgaaaggccatcagatccaggcaccgggggttcacacctggaatcccagcacttagggaggccgaggcaggaggtttgctggagttcaacaccagcctggggccacagcaagaccccgtctctacaaaagataaaaaaaattagccagacatggtggtacgcacctgtagtcccatctatttgagaggctgaggcaggaggatggattgagtccaggaggttgaggcttcagtgagctgagatggcgccactgtgttccagcctgggtgacagagcaagaccctatatctaagaacataaaaagtgaagggctgctaatattgaatgctcagtgccaggcctcatctattaaacactactcataagtgccagttgctattcttttttttttttccttttctttgagacacgatcttgctctgttgcccaggctggactgcagtggcataatcatggctcactgcagcatcagctgcccaggttcaacatcctcctgcctcagcctccatagtagatgggagtacagacacacgccaccacacctggctaatttttgtatttttagtagagaagggggtttctccatgttggccaggctagtcttgaactcgtgacctcaagtgatctgcctgcctcagcctcccaaagcactgggattataggcgtgagccactgctcccagcctagttttaactgtttgttgagtgcttactgtgtggcgaccattattctgtaagctgggctacagcagtgaacaaaatgactttggtgtcctggctttgtggcagggtgcatcttttatattaaaagaggtccttgttggctgtctctccagctcccactggactcagtggcggtgggggcagggcctgtcttggtcatcactgtgtccccaggcctgatacacagcaggaattcgttcagggctggccagccacataagctcactagagccgttcaggcccctgtgcccgctgagctgcgcctctgtccccagatctaccagagcctgttcctgcggggcctgtccctggtgggctggtaccacagccacccacacagcccggcgctgccatctctgcaggacatcgacgcacagatggactaccagctgcggctgcagggctccagcaatggcttccagccctgcctcgccctgctctgctgtacgcgggatggggctgtggggggagcaaggaggggggatgctgggccagccgagcctcccagggccaacccctctccctctctcccgccagccccttactattctggcaacccaggccccgagtccaagatctcacctttctgggtgatgcctcctcccgaggtaggtggggctgttgggagagcctggggggcccgggagcactggggcatttgggtcacgactaggcaggggcccctggttccaggctccactggagagttggggccccagtttctccatctatgaaatggggacgtgactgctgccctgcccatattttggtgaggtcctgggcgtggggcctccgttgtgtcattggctgctcagtacaaagagggctcccttcctgaccctgcctggcttcattccccaatcctgccctgaagtcagaggtcagccctgggaagtcatttcagggccctggctctcctctgggcctctcccacagtaaggatgctacactgcctccctggtcccaccaccaggtgccgatcccggtgcagagctgagccggggtgtgcactctcccgttcccagcccgggcactgccaattgtccccagctgccatgggctgcgggctggtgaggcttctctcactggtctgtgtccctgccagcaaaggcccagtgactatggcatccccatggatgtggagatggcctacgtccaggacagcttcctgaccaatgacatccttcacgagatggtgagctcgctgcggggcgggcaggcaggggctggcagtgcgcagctgggcacacgatgcgttggtctgcttcccaccggtgggcttgggaagctatggctggtggcgccttgggggcctgggttagggcttcttccatcactcaggacagagtccaggcccttgccagggtccctccaacttctgccctccctcacctccccacctgctgttctctaaggcactggcctcttctgccaggctgtccagtagagaaaccccagggactttgggtggtaactggatgaacactta[136 bp omitted]catggcgaaaccctgtcactaccaagatagaaaagctagccaggagtggtggcgggtgcctatagtcctagctacttgggaggctgaggcaggacaagctcttgaacccgggaggtggaggttacagtgagccgagatcacgccactgcgctccagtctgggccacagagtgagaccctacctcaaggaaaaaacccaacaaaacctaaactagttcgtcaaacctgtgacctcacaggtgtcactgctggggatgaggccgaaccagggggccacgtcaggcccgcgtggttctggagaactgggctcggtgagtgcaggtccaggtggacctctcgtggcagccacttgggcaacgctgctgcctccccctcgagagagccctcctggacctaagctaggtgagccctctggctaaggtcactcgtgatctctttgtggttggtttgttagtgatggggtcatgtctcagggctgcctgagactggaaccccaggagaggcgctgaggtacctcaggcttggagggagcctgggagtccatgctcctctgtcctgtagatgctgctggtggagttctacaagggttcccctgacctcgtgaggctccaggaaccctggagccaggagcacacctacctcgacaagcttaaggtgagccccaagtccccgcagacctcctaacggggccccaggagaggccccctgggcagcctaaaaggtggcagcaatgagccccgtgggcctcaggggcctgagacagcccagctggcagactggtgaccctggtcaccccgtggccaccccagcagggtgcaggccagatttgattggactgtggagctttaagctccggcagtgccggatgaggtcctggcagcgggttttgggagtggctcccctgcagagggcccagggtcctggccacccctgagtgtcttagggtagtggttcctggtttccctccacctggcatagaaagggactcattctgctcagctctcggctagctgtggaggctgtggtgtccccatgggtgtctggaaccaggcagggaggggctgaagtgggggcaggatcgggagtgtgcacataagccccacccctccacacagcaccgctgcccctgggagccaggccctcggttacatactgccccactgggtaagcagcaggctgtgctgcgggaccccagccctgtgcctcggtctcaggggggctcagtcaggatgctggacttgcacggtggactgtgaggcgcagggctggctaggacccccgggcacagcctgaggcccagccccctcgtttcagatctccttggccagcaggacgcccaaggaccagagcctgtgtcacgtcctggaacaggtgtgcggcgtcctcaagcaggggagctgagccttccagggcagggtgggctccagttgtcttgagggtccggatgggctcaggtaataaagaaacggaagcagcagccagccacgctggtctccccaaggctggggtgagggtggctgggtgcccaggctggtaccatcaccccagcttcctcacttccagggcagggcattaacttccaggatacccctcagcccctgcacctgggaactggcacaaaagcctcagggccagtcccacccaccttgggctcaggagcacctggggtgctggagggacctcctggggtgtgtgtggctttggagccggcccctcaggaaggcggtgggtggcaggcccacccctgcaccaagacgaggcaaggggctgtagaaagagacatttaatacttctgtttacaaaattcaggcgtacatttcagtttgccctggaccgtgcccaaagctgtgtgctcatctctgcgcccctcatgtacttctgacgaggggggtgcagggcagggcagagcagagcctggggtccggaggcttcactggaccacagggggaggggaatgtgaatgtggcctggcccagagaactccccatttcatcgattttgcattgggcgatagaggaagcagatgtcggggctgcctgccttggtctagaggagatggctggggccacttcccacagggtgaagtggcagcggctcagcaaggggagcctggccaccaggggctgggacatgcgctcactggaacctttgtgcttggccctcggcagcgcggctgtggtcccgtgtgaggtgtgctggggtgggtgtgggtggctggtggtggcagcttgtgccagagtgacacaggcctccctgggttgggatgggggcagttaaaaagctgaaaaggtacttggctttctgagggcggggcttgggaggcagggccctgcaggagaccatgttctctgtcctcaggcagatcccagctggcctctgtccccgggctgcaagctgacagcaggcccgggaggcggtgaggccctctgccctggccttgaggagaaggagtgcgtgtgtgaggcgggggtgcattggccctggagtagggccagggcccatcaccagcaccaggctgggagggatttaaaaccagggtcctatctctgagccaccccatggggaccctcgatcccatcctgttaaggctgcgggactcgagggtaggcagtgggccgggcccccgtcgggtcaggacggaggtgggggctgccccagaggaacattagtgtttctaagagcaccttagtgttgccccgcctcggccagctgggcgagaagttggggagcgggggaggaggctggcgccatggagtggggaagggagccgtcaccgttgggagtcagcgctagtgtaaacaggcatccccacccacccagataagcccccccacccaagtgtggggtcctgctcagggagtacctcaagggccggggcccaggtggcgccggcaggctcagacaccgccctggcagcaggggctccgtggaatgcaggagacccagcagggggtgccggccagtgtggacggaggggcggggcggggacacgggtgagtcactgcggcaggggcacaagcacctccacgtagctgagcgggaagaagcccgactggccgtccagcatgccctcgtaccagttctcatcgatctggttggtcagcgtgatgacgtcgccctcatggaagcccagctccccgtcgttctcgggctcgaagtcgtacagcgccttgcagctcggctggtccaggggcgctgggggcgggagcgggctgtggggctggggctgctacgcctcaccccgcccagtctggggtctcagacctgctgtgacctggagcgtgtgggtgggcatgggcctcccctctgccctgcctgggccaccccctgcccctgccacttctggggtccggcctctactgccacccaggagggaggatgggagaagcttggtttaagtggtcaccaaagctactcctgggaagtgctggggacacccggtgctgctgcggtgacagggagtgaccagatgccctcaagcccttgtagccaccacacagcctagagctagctgggctagtgcccttggcaatccctcattcacactgtgaggctgagacccagaggggtggcatcttgcaggctgtggggcctgtgccccctactgctgcacgagcctggcccctccctgcttgagatgggcagagaacagggcgggaggagaaacaccctccccgaatggccgagaaggcagcactgaggtcgaggcgggcctgggaacactcacgcatgctccggctaggggtccggatgggcttgtcggaagatcggaaagacgatgaagctaaacacaagcaaaacgaggaggctgtgggctcaaaacggtcgggcagggccccttctgcagaaggctggggccagcccttcccgtctgccttggcggtccagatggagcacggctgagagctgcacccaggagtctggcgctcagagacccaggacagggccagcccttggccactcccacccgctggcatttgcctccgcaagagggctccatgccccattacctgcgatcttgggggctgtggtgcaggggaagcccccgttggactgctcaggctctccaaggtcaaagggctcccggggcttgggcttatactcccgcttagggcgtgaggaagcttcccgcatcctgtgaagggagaggcgtgagtggaccgagcccgtgtcacggccgaggcagccccactcttgtatttatgctgctgcctaatgacctggcctgggactgcaggaagaggccgtcagtggggttgtgacacatggaccctgggacacagctagactgggatgtctacccagagggcctccagcctggacccccaccttggaggcatcccagagattgccaagcagctggggcctgccacagcatctacctacaacacccccagtcgcatcccctgcctcctcccccaattccccaccacggacggcgccccacatacgccaaggcccctgaagcaggtctggcctctgcattcagggaggggagcctgggtgttcctgtggcagcagcaacgtgcagccagggagggagtccccggggcctgcatcggggcagggctgggtgttgactcagagttctcagagccccagctcctctgacctcgcggccccccaggcctttccactcagtccccaggaagaatccaggatgctgctctgccatgtgctcaccccacagcgaggtgtgctgcccacttgcgctggcagagggcgcatggcagcccagactctggagagaccaaggccctgggctcacctgcgcttgagcttctccgccagctcgtccaggatctgcacggcctgccggtggtagtccagctgtgcatccaccagggccgagagctgactcacctgctcgatctgtggggacagtagggctcaggggctcctgccagtgccactgtcctgtgccttccctgactcccgaggtgaagccacaggaggcaagggggctgagaggggacaggggactggggcccataccctccacctcccctgctgcagcggccaggtaggtgccgatctgtcctccagctcccttgaggcaccaccccggcctcccaagggcataggtcttctcaggatgtgacaccccgagctactcacgtcagtctccaggaggttgtgcatgctggtttctgccacctccttggactcctcgaacttctccagcgcctggcgtagctcctcatcggggatcttgccctgccgcttcttcttgtagtcaaagtccaggcggcggccctccagtttcttcaggtggtgctggagacgtgggggacatgggtcacaccagtagcggccagagggccgccccacgcatggctttgacccactgtccctgcaccactggggatcctgcctgcctgagacccagagggcagtgccgaggctggaggtgagggtggcaggaatggggctgccccatccggcagggggaagggacaggccccaggctggcgcaggagcagcacctggatctccttcaggtctttctcgcacaggttctggagggggtcaatgaagttctgcttgacctcgatgtccagggagtccttcacctctgccaggcgcttcatggactcgccggcatccagcaatgcgtcacctgtggagaagtggtgggggaagccatcataccgggcctgggaccactagactgagacactcctcagcctttgtttttgaaatagcgtttcacaggctggaacgcagtggcgctgtaccagctcactgcaggcctcaaactgggctcaagccatgctggcacctcagcctcccaagtagccgggaccacaggcgttcacccccacacctggatcctttccaacttctttgagatgaagtctcgctgttgcccaggctgcagtgcagtggcatgatctcagctcactgcaacctctgcctcccaggttcaagcaattctcctgtctcagcctcctgagtaagggggattacaggggcctgccaccacatccagctaatttttgtatttttaatagagacggggtttcaccatatagaccacaccggtctcgaactcctgaccttgtgatccgcccgcctcggcctcccaaagtgttgggattacaggcgtgagccaccgcacccggtttttgttttgttttgttttgttttgttttttcatagtctcggctcactgcaacctccacctcctgggttcaagtgattctcctgcctcagcctcccgagtagctggggttacaggcatgcactaccacacccggctaattgtgtgtgtgtgtgtgtgtgtgtgtgtgtgtgtatatatatatatatatatttttttttttttagtagaagcggggtggggtttctccatattggtcttgctggtctcgaattcccgatctcaggtgatccacctgccttggcctcccaaagtgttgggattacaggcatgagccaccacacttggccccatcccaacttctaacagccccccaacactctaagcccagggcccggaaattggaactcagggcaaaacaaaggatcctaaaatccgaatcgatgctggacgttaaaccagaccctccaatgctcctaaaagggcctaggtttgcccttaacaggtggaaggacagatgctggggggtccaggccctggggaagcagctggcttgagttggggaaggtctggagctacaggaaggggccctatcagctgctggccagtgctggatgggttggtctgtgcagtctcctgcacctctgcagctggaaagctgtgggggccactgtacgtccccggcactcagcacatgcagggcctggacctgccctgcctgtgttgaggtgtggcctccagggacggtgggcgtggcttccagagagcaccactcaccaaagttggactcgccgcccagctccttcccgtggcggatcatgcactcgcccagaagcccctccgactgcgggtagccggggttcttcacctggccccggatcttggacaccgtgttgagcatggtcagcttagcccgcgaggctgggataggatggccaggtgggtgtgggctgtgaggcctgcactcctctgccctggcagactgcagcccccacatctcctccccacccttgcttcctgtgcctgtggacagcctaggccacacaaagcacagtggaatccccagagggtcccttccctgctcctgctagcctcaaaggagctggcagcgggtggagaggtgaccaagctcctcagggggcaaaacctcctccttccaagggctgctcctcttggaacgtggctatgacccctcatctggggggtgccagggaggaggcgcagcagtgatgtgcagcggggggtggttgaggccaaggctcccggggtgggtgatgagctgtgtcccttccgctgcccgcttgggtctgctcctggcagggcctgagtggacactgctgggtgtgcgtctgccccctgtccgtggcctcctatggagccagcatttgggttttccttggggaaaagcccgtctctcagccagggagacccagtcccaagcccaagaggtgaagtccaggccaggggcactggggaggggcggccaatacaaatggatcccacaagtaagctgggggagaggctccctgccaggactgctggctggaagaggggttgaaggctgggacggccctgaggaaccagtcggcatgagagtgaagccaacagaggggctgagctgctggttgaggtggaaaggcagcatgcagcaccaaggatggcctctgcactccgggatccagctgtgcctgaagcccacaacccatgagcctggcggttctgtcatcccctgccttccctctgacacagaggccagagggcctggggcaggccctggcagtggctggagcacccacctgggttgggctgcaggtactcgatggtcctggccagcacttctgtcaccgccttgctggtgacatccaccttctgtgaagagaagcagcatataagactccacagccagtgggggcccaaggcacacaagacccccgctgctgcaccgcctcctgccctaagagcccataccaggaccccccaaccccctctccatgtcttcagctcagccatgtccccacagctgcctgcccacggcaggggagagagctggtgcccgtcaagtccagctgacgaggcccccacaccaccccatctctccacacctgccgggccccatcactccagacccaggcccatcaaggttggccgcctccactatgcccggcagaggtcaggccccagcagtgccaccaccacacagagcacgcagtttcttcctcaccttctccatctctttgaagtcatcatccagcttggtcccctcggcccctccgaccttctcactgaccagctagaggacagaagaggggaaacgctgtgagcccaggggtaggaggaagaagaggacaggaggccctgagccgccttccagccacatcgcatccacagctggaggcaggaggccaagtgatcaggacacacacctcaggcactgccgtgggcaccccagggccacacgctgcctgcagagcagggtgggcctgcagggggagggggagggtgggggtggcctgcccacctgtgtgtgtcccgactgccactcacatacccactggggaccctgccacagtaggccccatctgggccacggtggagtccagagcctcagcctgagaacacatggctcagaagacactgcttccagaagcgcctacacaaacatccccacagatagcaatgtggggatctgcccccatccttgagtatgtggggtctacttaaaaaaaaaaatcctgccagcttggctgggagaggcagcaggagctgacagttacgagaagaggtgcaggcagccgggcagggaggccgccattctcctgtgctctggtgcccgtgtctgcaggatgggacagcccagcccttgccccatgtggacactgagtttcacaaggcagtcaacacaggcctggcacaccttggtcctcacggctctcagctacggtgaaagcgatgacaatgacaggcacttacagcgtctttcctcgtgtggtgggaaggcagaagcaagcactgaattcccaaaccactccctctgacagcgcctgggatgcgaaaaacagccctgaaatgtcccatggaacatggcgggaaccactgaaccccagcaccgctgtctgagcacaggcgttgctttcttcaccccacgtatcccatgtgtgcctggcgccaagggatgccgcacagagtgaggatggacagtgtgaggcccttcccagcacacagcgcttcatgaagagccgagtggctgccaggccctgccacaaatggaggctcccagagggaggccgcctgaggtcacaagcttggccctgccctctgggggccaagtgtcacagggtgtgccatctctgaagtcatcggcaaatttaacatcccgggtctgatcacttgtgtgaagacgtgcacacacggcctgggcaggagagtgaggtgttgcgtgccgtgggccatggcctgtgcccctggtgctccccaggtctgattggtgcttgcctgccccgagctgtcacaagacgtggccaagggatgccatgagggtccgtgtggtgccacactgcgttggctgtgtggggctggggggtgtccagcagggcagtcaggagtttaggacccagcctgggaggaagtgacccaagagcaggaagtgcgggggcaggagaagcttgagcctggggctctgcccacgccaggcacctggtgtaccctctagcccatgcctggaggtcacagcccaaggcaccatgagtgcaaatgcccccaaccccaagttctgcaaaaggtagcctgcccggagtacacggctggtcttgtgtcctggcaacctgcccaaaaagacaccagcccctttgccaaggaattcctggccctcctccaaggcttggctctggaagcccccacaccacgggactgtcctcacccacgcatcgggaccctttctgtccacctgccttcatgtgcggggtgtgccgggcattcagtgagcacaggccccatgcctctgacccctgtccctttcctgcctgtgggttggtggctctcaactcagccacacagcaccttggaagcttcttaaaaatcccctcgttggccgggcgcggtg[169 bp omitted]gaggtaggagaatggtgtgaacccgggaggtggagcttgcagtcagcagagatccagccactgcactccagcctaggcgacagagcaagactccatctcaaaagaaagaagaaagaaaaaaaaaatcacctcgtcacacccaccgcgggagggctgactctggcacaggtgagaagcaggaactgtcccttgcggggcaggagagtggggctgccctccatttctgctgaaggcattaggaggaaggagccccccctccctaggtgtttttggggcgttccactctatttcctgggacagtttcacttcttttgattgtggcgagagagggcgtgctcagagccagcggctgccggagagggaaatgagtggctgatgtgagactggactcttctgggaagccgggaggagaactgaagccagcgggctgcgaaaccacaccttctgggcggaggccaccccggccccacgacctgcccaggcaggacccagtgtgcaggctggcaggagtggctccgtcagggcccttccccagccccctgcctctcacagggcaggaggagaggccctaccggcgaggaccacatcctgcctctgaggggaggggctggggacccgccacggtaccaaagacccacctggtggcctctggctctggccctggccccacctgcccatctcacctgggaatccaggaccctgccttcctgagccccaggacgacttcctgaacccccacaaccgcctgactcctcgcacccctgacacccgggaggctgtgccctaactacccgggtccctctgctcagctccagccaagtcccttgtggtgactgatggtcccccacgggccaggcactgggcaggggacacaaccctgtaaggccccttctctccaaggcttatgggctagaaaccagcacagatggacacagggatgagcagccacaagggaaacacgggaaaagcaaggcagccgggccacgtgcagcgccggccgcaagcgcggaaaccaagcgtgggctcctgcccgctggggccctactcactgcggtctccacaccagcacactgctgagcacggaggggaccgagagtctgcggcagagctgggcgccacggggaggctcaccagagggcgcctctgggctcgctgtcaggagcgagtgttcctaaccctggtgccatctgccaggcaagagctgcctgttgtggggcagccagccccaatgcccccgcatcagagaccctaccggtggggagggaggactgaggccatggtcccagcagtccattcctgccgagggagactctgcaggctggctgtagccctgactagtgcagcggactcagcagtggcaatgacagctccgcactcgagtccatcccatacccacaaggctcgcctcctgttcccaccccgcatggcaggaaacggaggaaaataatggggccactcagtagccagggacccaacagggctcaggggtgagaccaccctccgctgactgaacctgcatcagggtggcagggtgggtgggggccccctccccactctcccacagggccccacctggacggggtcagagtaccagctgcaaaccccgagtgaccaaccgcaggccccacaagggctgccatcctgagagcaacaccagcgccttctctccccatgcctggaacaaacaggccgagcccaagagggaacagtctccaagactctgcccctgcttcagatgccggctggcctcccacagaggctgtgacatgtccccgcctggagcagggagaagtgaggtttggccaaccctgccaggcgaggaccagggctgagaagtcactatgggagaggccccggctcagtcaggcctggcagtggcctctgggaaggatcccactgttgcctgccggacacttccccagggtttggcaagactggcttgtggtctttcagatctttgcccagagatgcccagcggagacctgcccactctatgctcacgcatcccacctgcacccgccacctgcatgccgcatggattttctgcctgaccctgtactctgtcacctgtgagccaggcacctgggaaacgagcaagctggacacgaagatggggttttgccccagagcatgggactcttgtccccctgggagaagggggctattcctttgaagcctggcattcattagagtttagacctttggctctctttggaggggagcaagggatgtgacacacagaacagagaatacaaggtggaaaaatacagaaatgaactgtgaagacactgtggactgagagtcaggacagggctaccgtaggcaggagaatcccaggttttacccagaggggtgtgggcagctgccctgtgcccggcaggcacagctgtggtggccacttggcaggagcaggaggaaaattccgaatcctgccgagtggagctggctgctgccgatgggcggccttgggatttaaacatctcagcggggaaacctgatccacacagcacggaacacaaatgcccgtctcgggcttggtgccccagcagactatctgctctgatgaattcacagggttttgtttttttttctcttttaaagaagaaagccagcgtgggggagggcaagggagggctgctgtggcccagcctgcagggatgcgccacatttgcccgcagaggggtcggccccagggtcctcaggtctcactggcagtcatgctgtggtgcttggtaatttccaggttcacagcagagttcacgggtcctccctcggctggggagcgggtctctggctggtgtctgcctgcccgtcggcatcggtggtgctgtggtgctgcacgctgtgctacagagccatctccgcgtccctccctgcagtcctcctcagcggaatctgtgagcgcacagaccacaggggcctcgcccagtgccaggcacagagcggagaaatggcaggtgggcacggctggtcaaccgcagcgaatacctgtgacaaggcctcatctttttttttctttttaaagaggcaggggtctcactatgttgcccaggctggtctcaaactcggcctcaagcaatcctacctcagccttccaagtgccaaaactacaggcatgacacagtgtgcctggccaaggccatacatttacaggactaggggacaacagccccaggacaaagcatgggttggggagctggggaccataggagggggtccaggcccagccacctgcaggaccagggacagggcaggcaggacacacggaacaagggccactattcacagtcccatgtgccagcccccatgctaggcactctgtgcccggcccccaacgtcacagaggaggaagctgaaggggacgtggaggaggcgagtgctcagcccctcctcacagtgggcgcagttctaacactgcagctgtgttcaaggcctggtcagccatggaaaggggcaaagccagggtaaggcctgcagaagcagcagagtccttatcagacctctgtgcaaaacagctggaatacagggtcggggtggaggccccagggagggacgtaaggatccctgtggtgtagaaaaagccctgacgtgggaagagggcaggggcaaaggatgtagggatgtatcatatccgtgtgtctctgaacccctttccatctgcaacgcccttccctgctggcccaacacctgggagccactgcccaacacacatggccacctcgagtccatcacagcttctttcccatgagtcaaaaagtcgaagacgcgcacagcctggaggcggcctgctgcccagcgacacaggaagccactggccttcgtgtccccttttccatgtgggctcccaggctcctggcttgctgatgtgtctgtctgtccttcctggaaaccttcagtggccccagtggcatggggactctccagacctgaggcccttgcgtgctgactatgaaagctcgcctatctacaggggcggcgctggctgcaggcagctctgagctttcctgtgacagtaagtgcctggcatgggtggggttgtggcccctgggctcctggtctgggagcctgcagggcatccgcaggtgaaaagcaggagtagtcattcctgcacatgctcagggatgaggccaggagggggagggagaggagcagtgggagggggggccacaggagcaccacaggtgccaagtgaccctcacaggtgccaggtgatcctcatggcccggcggcgaggaatcagacggcagaaacccactccccagcccaagggaagatggagggagcctctgccttggggctgactgggtcatcacccactgtgtgtgatgcacggagggaagggtcccgacagccggggctcccctcagcatctgggagttctgagagccctggatttgccactgtccttcgagcctccagcctctcagtagagatctcccctcctgtccatcaaggctgaatggtttttaaaaagcagcctttgggaacggaggcactgaaaacaatgaatcaagacaaagtttctgaaattattttctcacggaaaccccaaaccagacgctgccaccatggccagattgggcacccggggacagccacagacccacctctgtggcgggtcaggcgctcctctgggaaccaagctctggcagcaaaaggacagtggctctggaagccccaggcgtcctctcagccaaaggggcagtcccttgggcctgggctggcaaccgagataccggctctggactggaaccagaatgggctctgcctcagaccaggccacagagggccccctgagagcccggcttccccacggcccccaggctgtggggacaggcctgccacagacttcctggccagaggtgtggctgggtgccatggtagggaaagacagccagacattgggggccatggtgcggcccggccaccgcagtctaaatcgccttgggggtgcgtttctgccaactgtggtgctggccattcatgccgtctctcaggctgtcgggccctgccctgcctgactcctggctcttggagctggagaaaggactctcagattggcagagagcgataaatgctttgttgtgtgcgcggcagcgagccgatgtcatttgaagtcacagcacatgaaaatgagggggagaaaaaaacttaggcaagagaaatcctccagatgggccctggaggccccatccaagagtctgaggccaacacatcaggggaactggaagcagagagggaatcagccactggaaagaagtcacgcagacgaagtggtgacagccacgacaggaaattgctcagcggtggccacaacagagtggcagccaggggccaggggccagctctgtgaccatccccgagagagaaaggggacattcaggcctggtctatgatggtctggtggccggaggctccgtgagggcagccccagggccagaaggacctctcctgtgctgacagcaaagtcaccagcgggagtccagcccacactgcctttctgatgaggcctccagctctggctgctgactttaaaccctaaggaaccctgtgcagggcctgcatcccggaaggcctccaccagcccgaacctggcccgtccgccctagatggggcaatcggcgtttctcccgggacagcctcctccctggcctcctggccctcgtctgcattgagaggcttggcctctggtccgcatgctgcccttcccgtgctgtggccttgcagcccggcctctcccctgctgtcccccttggctctggcctggcccctgggcccctgagtcacccctgaggtgactcagcagtccttggaaacgcatgccgaggacgcaccctgcctggcccagctccacatgggtgtgggggaggctgcgggctgcgcctggtggccgtatggggcctaggctggccagtgctgcccaatggtgggggctccctcaccgcccgtctggcagaagccatgggccacacgctgtcccagcacatggtggcagggcggtgacctgggctcggctctaatgaccggcagccctggggctcccatcaccactaccagtctgcccaggaggcagcagagcactgagcccgacctgctcccctcgggcacctacgagacccacctgcccctccatgcgtgggggagaaggggtgccctctgctgtggaaagctgggacctactgtctgtggtgcgaggctgaccccacagagctccaggacaaccccgagaggagtggacagagccagccgggccctccagcccccacctggcccagctgccgcctctgggcagatgtctccacttgataaacaggacagctaagggcctaggagagacatgcctggcccaaggccagacagcaggagtggctaggaaggtcaagggatccccactgcaggccccaccaaccctggctctgcctggaatgcagtcagggcaggtggaaggggaggggcaacgccccagggctgggcgaggaatctgggagcaggtgggaagctcatgctaccttcccaggagacgggaggacaggcctgccaaccagggggctcagctatgtgggacacacgctcccacccttgcccttgcacagggtttcatccaaacatggagatgccagtgagtgcctggggctcctctcccaggaacaaaccacacccagagctccagcccgagcgaacacatctacatgaaaatcagcctcatgcatcatgcattgtaatttctcatcttggggaccaggcaggagggctgtgtgacatacaactggtaaaatcagtttccgatgaaaacttataaaaggaaaaagccaacccacaaacaaatgaggcgataaatcccctgaggctccgcctggcagggaaacaccagctctgcagcactgagcacaggctggtgttcccactgggggcagcatggaggatctgcgtccagggggcagagtgtgatgacatcacccacatgcacaggaacgataaggctttcttaaaaaacgatcttttctcaacagctcctcaaaaggagctgaggcaatgcatagccctgcaggaagagactggaaatggtcttggagagagaactgcggggcatggtgacagcggtgagaggctgcaggtgcacagatctcaacgaggggccgtgagttccctcactccctgagagctgaggagacttgcccgaaagcccagagcccttcctgagacacagaaaccatcttcaccatctctaagatcccttccatttctgaaggacttccatttctttgtgactgtgggccaccatgggcatgagtcacctgtcaccagagcctggtgtccctgtgcagctgtgccaggtgggcagaggagacaggtgaaggcacattcctcagcgcccgctcacagctctgcccaccgtgcattctgtagagaacctcagcgccctcctccctgccggcagccaggcagggatttaggtggtttctgtttggcctccagtgcttgcctctcccgtgtcctatccgcccagacctcagacctcagagaagcctcctcccacaggaagctctcctgattgatccccatcactggtctcctcaccttctcccaacacaccactgatgcctcctctctcgtgcgcctgccccttcacacttcatcttacacccccatctgcctgggcggcccccccatctcccctcagagcttttgctctcgctgttccttctccctcactgagcctccctggatcttcccatgctgggtcttagccaccagggctctgtccatccaaatgtccccatggctgcaaggctgccccaccctcctgctatcctcacggggcctcgcattcctcttgcttgcttgttttcgggtcccctgctgtcccgtctcagacacaggaagcactctccaatgcttagcgccctagaataaaggaccccgggcaacctcttgggggtcctcgccacatcccaccccttgacagcagctaagctccgggggcagcaactccccgcagtgacccggaaggcagccagatgatactcctcccatcaccttcccttttgtggctcgtggacggttcacctgggctgacactgatggaggccgccaggcccattcccagcctggagctggctccctccccagagagctgcaaggttgggaaaatttgcaaagaacaaaacgtgagctaggcaggcctagcctgactcacatcctggggacccagctaccacatttgggcagtttcttatccaggaggatgcccgggaacagtgacaggtctgaggtctgggcggataggacacgggagaggcaagcactggaggccaaacagaaaccgcctaaatccctgcctggctgccagcagggaggagggcactgaggttctctacagaatgcgtggtgggcagagctgtgagcgggcactgaggaatgtgccttcacctgtctcctctgcctatctggcacacttacacagggacaccaggctctggtgacaggtgactcatgcccatggtggcccacagtcacgaagacaggttttctgaggtgtggctaccaaaagcacccaggccagaagtcatcccgggtggcacggggcagggcagggggtggtgagaggcggtcagcagctctgcacagccagccgcgcctgtgcactggggccctctgcgagcattaggtgccagcagctgtcaccttgcagtggccactcctgccccctcgccaggtcacgtgcactggctctggcgcatgggtgcccctggccgctcagaggcactgcctgctccttacacagtgatgtcggtggtggaaacccgggctgggaatctcagaattgctgaccacggcctcagcacagaggaagcaggcaaatggcccgagtccccccaccatctcccctgcagcgagaagactgcagcctctcctgtctgaagactcgcgtttgggtcccgggcctgggagattctggcgggtgcagcctgcttcccagggccccttctgccccgctgtggctcatcgtccttggagggacaccactcgggacaggctctcgtcgccaacccaccccaagttctctgtcctcaaacacaagcttcctgccagcagggccaggcacagggacaggggtggcagaggcagcacagggcctggcacccaggtggcgtcagtcactgagtatatggtgagataataaatactagttgttgagataacaaataaataagaagcagccctgccctcgggagctcaggtgtgccagtaacacatcagagcaaaggtgtgccgtaacgccacgaggcaagcaggctgacgtgggattagggtgcctggatgggcgacaccgggactggatgtggttccagctctgccgttcggggctgtgactctgagcaggaacacaaacccctctgagcctcggttttctcaaccatctcaggcgtggatgtgctttagaaactacacaccaccaggccaggtgcggtggctcacacctgtaatcccagcactttgggaaaccgagacgggcagatcacctgaggtcaggagtttgagaccagcctgaccaacagggagaaaccccatctctactaaaaatacaaaaattagctgggcatggtggtgcatgcctgtaatcccagctacttgggaggctgaggcagcagaatcgcttgaacccgggaggcggaggttgtggtgagctgagatcgcgccattgtactccagcctgggcaacaagagtaaaactctctcaaaaaataaaaataaaaaaaacagaaaccatacaccaccctacgatcctaggctactgtgcactgagcaactgagtcccgaggaatgatgggtgtggggccggccaggggtttcacctccgccccacgacactgcctctgagcccagtttttctggagcaagaggcttcatgcaggcccttaagaagaagaagaaaaggaacacaccttacctgagtcacacccatctccaagggaccctggtgaggcactcacaggaccacgcacaccaggaaaaactggctacagctggctgatcgtgcacgaaatctcatgttgcgcccagagcgcctccagatcagccacagagtcaagtcccggttccaaaatgctcacagcacgggacatatttgtcaatggccgtgacacaaattctgaggttctactggcggacgagggcgggaggaaagaagcaaaggactgccaggcttggtggctcatgcctgtaatcccagcactttaggaggtcaaggaagcagatcacctgagattgggagttcaagaccagcctggccaacatggtgaaaccccaggcatggtggctcatgcctgtaatcccagctacttgggaggctgaggcaggagaatttcttgaacccagcaggtgggggttgctgtgagccaagatcacaccactgcactcctgcctgggtgacagcgcaagatgctgtctcaaaaaaaaaaaaaaaataaagcagcaaaggaccaagagagaaaatgactcaacttaaaaagaaggttggtagaaaattccccacatccctgacacacacctgctgctgtctcacaccccaggcagctgccacagccgctgcgccctctctcctgtttcccaatcaacctgcattcctgtcttcctaccagctgggaacttggcacagctgcccatcctgaacgcaactccttccctggggatgtcccgccctccctgcacctctgcacacccacgctcttcctgccttcgagaacgtgcctctgtgcatgggcgagcctgtggccgtgactgtgacccctcactgccaggatggctgctgctgcgacgtcaacacaaagcacgccgctctgccttgtgcttacttgtattttggggggaaagcagccctgccccccaaggcttgcttctctgttgtcatcgccccaaaggacaagggactggtgctgccacttcctgagctacgagcagtaagaatattcaaatctctcccaccctgccatcatggtctggtagccaggctcctcccagggtggcttccacttccctggaaggactggccccacggatgctgcatgggctcaggttggaggggaaggacacggcagggcagacccatgctgctggggccccagtgctgggggcctccctccaacacctgcctaagggatgcccagggcagggctctctccctgcaccggaaactctccctcctttccttgcttcttcctacatccaaattctgcccattcttcaaagccacggtctggagccatcactgaggtccaagtcaggctgaatgagtatttacctgtgccaggtacagtggaaaaggaaagacacgtaacccaggctcgcacacacacaagaacctaaggccctatgacagacaggacgccagcggggaggggccgcttcctccttgcggggagggagccagggtgaggcaggaaggaggtggccgtggccgtgggcttttaaggatgggtgggatctgggagcacgcaggagagagggcatgacatgagcctgcagcagtgaggctggcttggaaacatgcccaggacaaggtttggaagtgcccgtttggaagatgtgggagggcgtcacgggtgggtatctggctccagctcttggactggaaaaaacgtgcgtcaaactcatgaattgtcaactgtcttcaggacagtcggcggttttgaacatgatctgctctggtgtttctggggtgtgtggtcccctcaggcttagacgggcaatagcatgttctgtgtaaacctgaatgaggggacggttttcaaaatccaagttaagtaacggggactgaattttctatcagtccactagcttttaagtcaccaaggtgggattccagaggccagggaacaacttctgcgaagttgaagattagttccacagagtgtcacagccaaggaaggctggatggaaccccagctcttagcagggcacctcaagccaacatggcaaagtgaaccggtcctatttccttgttgatttcagggatgagagctaacagaggaaaaaacaactctgtttccccaccggcctcctctccctctctctgttcccccagcctctctgtccccctgcctctctctgtcccctctctctgtcccctttgcctctgtccccctgcctctctctatccccctgcctctctgttcccctgcctctgtctcccctgactctctctgtccccctgcctctctctcccatctctctctgtcccctctgcctctgtctcccatctctctctgtcccctctgcctctctctgtccccctacctctgtctcccgtctccctctgtcccctctgcctctctctgtccccctatgtctcccgtctctctgtcccctctgcctctctctgtcccctctgcctgtctcccatctgtcccctctgcctctctctgtccccctacctctgtctcccctctctctgtcccctctgcctctctgtccccctacctctgtctcccatctctctgtcccctctgcctctctccgttctcctgcctctgtctcccccgcctctctgtccccctgcttctctgtctcccgtctctgtccccctgcctctctctgttccccctgcctctctctgtctaccctgcctccgtctcccctgcctctgtctcccctgtccctctccacc[142 bp omitted]tcccgggttcacaacattctcctgcctcagcctcccgagtagctgggactacaggcacccgccgccacgccccgctaattttttgtattttttagtagagacggggtttcaccatgttagccaggatggtctcgatgaccacaacaaatcgccacaaacctagtgacttacagccacacacgacgtcttcaacgacatattaaagcaacacaaagtcttcactaggtcagaccctgacagggatcaccccgggctaagattgagatactatgagctgcactctattctgggggttctggggctttcctgccttttccagaatccagaggccacccacatccattggctcacggccccctcctccctccattgtcagagctagcaggcgctggcccctcaacagctatctcttgttctctcttccgttgtctcagctccctgtgaccacagcaggggaaggtgctccgctttcttttttttttttttttttttttgagacggagtctcgctctgtcacccaggctggagtgcagtggcgcgatctcggctcactgcaagctccgcctcccgggttcacgccattctcctgcctc[224 bp omitted]cttgtggataagccaggataatctcccacccccaggtccgtaccctttgtcccatctgcaaagtcccattttccatgtaagggaacagtcacagttccaggggtggaggtgaggggcagccgtggcgggtgctgtcctgcttgccacaggagctcatcacttctcgttattcgtggcagctctgttctagaaagctacctcaagcacagagttggccagtactgagccactgttcagaggggaaacacacagctaggtttctgtgagcctctgctcacaacatgttcatcaaatggtcactatgtaacccagttttgtgtatttcattttttctttttgagacagagtctcactctgtcgcccaggctggagtacagtggcacaatcttggctcactgcaacctctgcctcccgggttcaagtgagtctccagcctcaggcttctgagtaattgtgattacaagtacacaccaccacgcctggctaattttgtatttttaatagaggcagggtttcaccatgttggccaggctggtctcgaactcctgacctcaagtgatccacctgcctcagcctcccaaaatgctgggattacaggcatgagccaccacgcctggacattttttttttttttgagaccaggtcttgctctgtcacccaggctagagtgcagtggcgtgatcatggctcactgcagccttgacttcccaagctcaatcaatcctctggcctcagtctcccgagtagctgggactacaggcgtgcatcaccacacagagttatttttttttttattttttattttttggtatttttgtagagacggggtttcactttgttgcccatgctggtctcaaactcccaggctcaagccatcctcctgcctcagccttccaaagtgctgggtgacaggcatgagccgctgcacctgtcctttatgcgtatttccttagttcatatttactgtgattcacccacactgaactcatggacacggagctatcactcctgcctgagagaactgctctcacacatggtttctctgtgaggctcatcccagcctcctggcactgaggaacacgagacggcactgctgcatgatgctgggaccattctcaacagcgaaatcaccaacaaaatcccaaaaatgtgagaaacatggcgctaaaagcctgcaaatccatgccggaacacagcgtgagagccgggaaaaggcagcgtgatccacgccggaacacaatgcgagagccgggagaaggcagagtgatccacgccagaacacagcgttgagagctaggagaaggcagtgtggctttgtttgacctcggctaggaacatatgcgatgggtgacagattttttgctgctctgcacttgtctgcaaaagactgcaaaaggaatgatttggggctacaaatcaatcttatcaagtaggtgaatttgcacagggagcacgtgagtcctggcccaagctgccctctgcgacaaggctgggtgctaggtgctttctgtgagcgcggcctcactgtacacaacaaaactgaaaacgcaggctccagaggaatttacaggctggaggggatgttacatccgtgaggaggatgcccagcagaagcagagtcctcagagctgatggcgcaggagccccccagttcatcccgctccggaccacacagagctaaccctgagctgggagcctcctccccgcccacttggcttcctggccaaggcccccaggcacatacagcacggtggaggagggttgaaataacacactttacgagtgcgcaacacacgatattgctagccaccggtccaggactttcggtcatgcaaattgaacaggttgtttttttccaggctaggactgctgaaaacctatgtggctatttttctttttttgaaggcagggtctcgctatattgcctaggctggagtgcagtggctattcatgggcatagtcatcaagcactacagcagatgatcatattaagcaaggtaccgcactggagaagctctcagatacatgccacaggggaccgctcactgccaggctgtgtgaaaatgcagaaacttggagactctaaatgtccactggctggagaacggatagacacactgtggaataaccacgagggaaagccacgcagctgcggatgcgagtggagcctcgtgtgtcagtgtgaacggtactcacaagcagtgctcagcctaaaagtagggtgagcaggtgcggtggcttacgcctgtaatcccagcactctgggaggccaaagcaggcagattgctggagctcaggagttcgagactagcctggccaacatggtgaaaccttgtccctactaaaaatatgaaaattatccgggtgtggtggttggtgtctgtaatcccagctactcgggaggctgaggcaggagaattgcttgagcctgggagcgggaggttgcagtgagctgagattgcgccattgcactccagcctgggtgacgagagactccatctcaaaaaaaaaaaaaaaaactagggtacgagaaaccaagcaagaaagcacgtgatcctgttgacaggcagtgtggaccgccacacaaccctgcgtgttttggcgcagtgaacgtgcgcagtgaaggcacgccggccctgctctggcttccttgggatggggtgggggcacctgctcatctgctggtcattcttagctgcctttctggatctgaaaccctttatgatacaaccttcatgaggtgcctgaacaagggaggtgccctgtgccacatactggtgccgaccagcgtgtggcccagggaatgtgttctgaatgcagtaagaggcaacctctcctggaaggagggcgaccccctaccggctcctctgacagccgagtggactcctgggctccagaaacgtgattgcagcaggcagaccaaaggtctttctcctgccctccctcccagcagcactctttccttccgggccccaaagaccctccctggctgtgcagctgcccactatggaaccctcagccagtctagaggtggcacagggaccccactcaacagaggggcccactggtgccttcttctgacaggcacagagtgctctggggctagccggggaggctgctgtgggaaggctgggagtgggagaacactggaaaaatacacaggattctgcaagtatgaaataaaaatgtaaaagctagggcacagcgcagcattccagcggcctccgagccagcctctgcagtgggcagcacatacctcccagacacccacactacgctcagccaggggtccgacagctccaaggctcctcgtgggtggaacgctgacttgaccagagtcagcaagaagcaagatactctgcagttctgggggttgtccttccttcctaaaataatagcagggattctcaaccttagagaaaaccatcagaggcctcaggagaggatgaagatgatcttatgccagggtgggtgaaggttgggagatggggaaattccaaccaggtccctgggctgccctcttctgagccacaaaggctggccttgaagggccagggctgcccatctgtttcaaacaatcgggactctgatgagtgaggctgttaggctgatggatgcctgcctgagtcagctgtggggcctcatcccacagaggcgggtggcaagggattgcggcgagggcgggcagaaagttcccagagcttccttccgcagggggcttcctgagaataagggtctctgcttagtgctggggcaaagtcccgaaatgacagcagaaaaataatcagtcagcagttctgcttccagcacgcagggctggatgggggtgtcctggaggaagatatttgcattactgcttgggtgatgtttgggaactcttttttttttttatttctttttcacttttttttttttttttttggagaacagggtcttgctatactgcccaggcagatctcaaactcccgggctcaagcgctcctcctgcctctgcctccctcagagctgggattacaggcacgagccaccgtgcccaacaatgtttgggaactccttaagaatgctgactgctgggtctccagcttccatgcctttccccaggcactcaggacctggctgttaccaacccatcagccctctttcctgagcccaaatcccagtgtgcaggatcccccgatcctaagaggcgagactgcagagggcatggcggtgggccccaagggaaaaggcaacgtgccttccgtgaggcatttcccacagcgtggcagctaacacaagcataaggcacgtgaatcacgtggtcagaacacaactccgctgcaattccccttctgtatttctttttctttttcttttg[272 bp omitted]gcctggcccctcttctgtatttcttattctggcaagaaggaacttccaggtgggcactactatagtacaggctttgtttttgttttttttaggcagggtcttgctctgttgcccaggctggagggcagcggcatgatgatagctcaccgcagcctcaaactcctggacttaagtgatcctcccacctcagcctaccaagtagctgggctacaggtgtgcaccgctatgactggctaatttaattttttgtacagacggggtttcattgtgttgcccaaatgggcttgaacaactgggctaaagcaatcctgcctcagcctccctaagtgctgggattacaggcaagaatcaccacgtccagcccgaacagctctttcacaagagagcacacctcaggctcaggggtggggtatccagcaaaatttcactctattgttttgctgctgttgtatttgttattccacttactgtgcggggttttttgtgttgttttgtttttgaggcagagtgcagtggtgctatcttggctcaaggcaaccttcacctcgcaggttccagcgattcgcctgcctcagcctcccgagtagcggggat[131 bp omitted]gagttcaagcgattctcccgcctcagcctcctgagtagctgggattacagccatgcgccacccacgcccagctaatttttgtatttttagtagagatggggtt[132 bp omitted]aaataccacgatcccctttaaaatacattttaaaagtgataaaataaaagtaatttaagaggaaagaggccgaatcagctaatgggttcaagctgaaggacaggcgatgaaccctggctgtcatttcagggcatcaccgctggccagctgcctgctgtggtctgcgagtcgtgggagtgtcacatttgaacgctgggacaggggacgcaggcttagaagacaggtacagagaggggcagcggaagcacaggagacagcaggctcagagacagaaggggccatccacagggagaagtgggaggagccgcagggcctattgtggcaatcagagagaagtcactgcagcaactgggcacagaggccagggagagagctgcaggatgggtggccaggcccagccatggcaaaagtcctaagaatcttggcaaacagggctggggagccagtttctggaggctgggagtggtttagtttggggaagcattcaagccagggaaccaccaactctgagcagaccggcccagccgggcagcagcaggtgcatttcagcctggcctcgatcaaggggggaagcaggcgtctgggcttggcttcttagggaccctgctcaggcaggctctgggtcagagactgcctgtgacacagtcaggccctcggacctggccaagttcaggtgactgtcagctgcagccctggagctggacacacaccctaaaccacaggagacactctctgagctgttgattttttcagagcagtcggacctgttcccaaccgagttctccgaggccttgtcagccacctgcctccctggtgctgtgacacggcctggtcagatgcctggccagcggaccaggggctgctgttgagccaccaccagggacaccacaggggccctgtggaggacagcccctcactctgagaaggagccctctagctcagcctctgtagggggcgtctctggcaacctcatcagcaggccagtgcccagcagaacatggcccatcacacatgcccgagcacagcccagcctcaggagctgccgtccgatgggaggagagcacctcacacgaacaccagcgtgtggcatctgggtgggggaccccgaggccagaagctccaagggctgagaactcagttcccacatgcatccccggaagatgccaaggataaggggagatagaaacgcgttcgttatagggcagacaggaagtggagagaaaatgaggttgggaggtaggagaggccggtgacatggacaggaggcaggagagtacagggccccacacagggtgggcgggagggactgactgtgtgagttcccatgcaggggaagagtagcatttaaacctgggaccaaggcaggggctccagaagctcccgaaattcggctgagagcttgaactgtaccctgggccaggtggagacctgcttctcttcctctagggcgtgctcacacaaactcgacacgaggccatccgctgtagggtgggggccacggtggcccatccgtccttccatgtgatatttaccggctccctggggcaggccagccagtaaaccaaacactggggatgcagcaatgagcacaaatgcctggctccggcggcaatgggctcatattccagtggcaacggcaatggaataatcactcccattggcatgaaaccatgtggggagctgtccacttgggggccagggcagaggagacgcatgttcccggcccagggaggggagtgggcccactcaccccatgccctcgcaggcctgatgccatctggattctgagtatctgccatgaccaccgcccctacagactgtgtcacacgcggcatgacccctgctgggtgcttcgtccccttacccaggtgtggaactgcggcccgctaggcgggagccccctcccaggcggtcagtgggccgctgctgagtcaggtccaatggaggaaactgtccgtctatcttcctgctgtggtgaggaggtctccccgtgaccctgctctcagggcctggtcagcaggtttttctaggagtggagaggaaaaggaagacagggccgtcctcccagagcctgagttcagggagccctgggtactgcttaacaggaaatgagcagaaacgcaccaagctgcagtgctcaggaaaagtgcttgccaaatccagccctgcaaaaggcgagagatagagaaagagagagacaggcaggcagacagacaggaagaaggtgtggagaggacagacagagagagaggaagaagaggtgagagggcaaaagaagggagagacagagagaaagacaagggaagagtgagaacagaaagagaggaagaagaggggggagagatagggagaggaggggagagaagggagagagggaaacccgctgcagccctggccaccacattctttcatccgctttccagggacagcttcgaaaaagaaccagaagagaccgccccctgacacttcagctcacacattaaaaagccattagagttggagagctcaggtcctgctgagatgcctccagagcctgttgagctcctgacacctaccccacccccaccccggggcaatgcttccccttccaaccctcccggcacttaaagacctcaggggcttggaaaagagaaacatggaggccgctctgagcttctcctctaagctctgccccgggcagcgccgaaacctgcggctgcctccgaaatcctactggggacgttggcagcatgctccaaattaaacacgacgtttccccagatcagatcagttgcaaaacactggaaacaatcacggaggaggaaaagggctaaggcagcagtgaaggcttggctgtaccctaggcccctggattaaagtccactggacacagagacacaggcaggtctgagcgggacgggcctcaacctgcaggtttctcctttgaggaaaaaatgcaacagacacacacacagacatctgaggggcccagctgccagctcagacctcaggtgcactgcgcacgtgacagcggccacccctgggtggccaggggtggggtgagcagtgtcatgttctctgtgtgcttgataggtctggggtgtcaaaatgtgacagcccccaatttcttcaactgagcggcataaggtgagacacctcatctcgcactcacaggctgttattaggggcacctggaatataattaagtactgcagagctgggctttaacacacacccagataagcagggcgatcagcacccacggagccccaactggtctttggtgaacacgggattctgagtcagagacaaacttttagccgaactttcagcccttgacttgttctgggacctactgtacagcagtcacgggtggcagaaatcggagtctgatgaccccttggtcctggtttgttaagaatgggaaaacgtaggatgctgcttggttacaaagtgcccagtgaccaccaacagccaaccctgtgaagggggccaggtgagccaggtttcacagacaggcccggggagccgtggggtgtaaggagcctctagcttcctttggggaaaggcagtctcaaacttctgtgtctgcacagcccagctggcacacagttcaggcctccacacagctgctggttccacccgtctgcaagccagaaacagagtgagccctgcctgtcctggggtggcccagggtccacgccgccggctccaatgccggctccaatgcctcaaggcacacaccagtacatgccgcacgttcctggattcagtcaccagagcttcctgcaagaacggacttaactccattcccatcatacgtggacatcacaaagcaaagtcccttcctacatctgttgccaacacctccccgagggagagggggcttccggaggtcagcctgcagctgctggactcaccggccttgtcccgggcacagcctctgaatcaccaacgccggcccttaccagcccacacaaaagtgcctctcaactacctgtcactcccagcacaagggtatacacttttatctgtgccaa[135 bp omitted]gatgaaaccctgtgtccactaaaaatacaaaaattggccagctgtggtggcgcacgcctgtattcccagctactcaggaggctgaggcaggagaattacttggacccaggaagcggaggttgcagtgacctgagatcggcccgctgcactccagcctgggacagagcaagactccgtcacacacacacacacacacacacacacacacacacacacacacacacacacaaaagatcattccatgtttatggcttaacaagtcaagcactttggtaggaaaaccaagagtggccccacaaagtgaggttttaaaaaagaggtcagggccgggcacgtggctcaggcctgtaatcccagcacaatgggaggccaaggcgggcggatcacctgaggagttcaaaaccagcctggccaacaaggcgaaaccccgtttctactaaaaatacaaaaattagctgggcatggtggcaggcacctgtaatcccagctactcaggaggctggggcaggagaatcgcttgaactgggcagcagaggttgcagtgagacaagatcgtgccactgcacaccaccttgggagtggggacagaacaagactgcatctcaaatacgtaaaattttaaaaaatcataacaacccgggcgtggtagctcacacctgcaatcccagccctttgagaggctgaggcaggaggatcaccacctgaggtcaggagttcgagaccagcctggtcaacacagcaaaacctcatctctactaaagatacaaaaatcagctgggcgtggtggcacatgcctgtaatcccagctacttgggaggctgaggcaggagaattgcttgaacccaggaggcggaggttgcagtgaggtgagattgcgccactgcattccagcctgggcaatggtgtgagactccgtctcaaaaacaaaaaaaacaaaaataacaaaacaaacaaacaaaaaaaaacaccatcataaataaactaaaaaaaggtcagggccaagcacagaggctcacgcctgtaatcccagcactttgagagaatgaggagacaagatcacttgagtccaggagttcaagacctggagtggtggggtttaaggagcctccagcctaggcaacatagtgagactcagtctctacaaaaaaattaaaaaataaataaaaataggcgaggcacagtggctcactcctgtaatcccagcactttgggaggcc[268 bp omitted]ataaaaataaaaataggtcagaacaagcagtatcgttgacattctgaaacaccagccatgtcccagacactgcttactctgacctacagcccccaaataggtggggcccaggatcccccggcagacagtcctcccccaacccccctggcctctccttttctcctaggcacaaacccagggcctaaggagcatcaggcagatttcaaagctatgggaggtgacgcttgtgaatgtccctcctagctcagtctgaagcaatctttccattcaaatgttcaaaccctctccctcctttcaggcaaaaaaaaaaaaaaaaaaaagccagcattccaggcagctgccagctctacccctagttacactctcaatctcacacagcccggccacaagatttatcaggaagccagttagcagcttaagcctggaaataatgtcacccaaacccccagcacaccaagggaacttctgagagcagctctcgctagcggcattctttcaccctccttagtcccccagttctagctgcgcacggatgccaggaggctcttgagggagtgggtgtcacacaggcagaaaggagggaaccagggagatgggaccatgacggacggctttttactgctttcttccagatgattcaactttccccagctcaggccctcaaccagtctatggccagttcatgacaagaagtaaaaactcacaaactgcccactcaagcccaaaccaattttgaacaagttcccaaaaggttttgcagggagatgaactagcctggaacccactaaggttcttaccattatcaccaacgagagatcagaaactcagaaccaacaacacagcctcgcctgttagaaagtaagtttatcttttccagcactctctcccgcatcctcccggcctctgttgatcaatttagaaaggacaccgtaagaacccttggaagtctagagcctggtttaaagcagggtttcttaagctcaactctactgacgtagggctggagaattcttcctttgcagcggggggaagctgtcctatgcattgtaggatgcttggcaaccatccctggcccctatcccctcgatgccatgagcattctctcccaaagttgcgataacaactgtctccgacattgccaagccaaggaaggggtctgcgccatccccggctgacagcgctgatgggcgcgtgcccctccttcaggagccccgatgcctgtggctctcaactattaaatcaagttccagcaaagaactggaaacctttaagctgtgtatggaaccattgtgtgtagcactggaaactgtcccttttctaagtcactgtaaatggtgtttttttttggagacagggtctggctctgtctcccaggctggagtgcagtgctacaatcagggctccctgcagccctgacctcctcaggtgcaagcgataaaggttcctcgtgatcagctggaaggtacttttgaattaaaggttcacactgaagaacctaagtggatagtggcatttgaggccagcagtgaaagtgtttcctctcaaagagttccctacacagcagcagacatggttattctgagagtcatgtatgttctgtgtttctctgtgaaccatgtttcagtctttgtttctgtcatcatatgtacgggaaattccatagagactacatcacacaaaactgacattgtcaattaccaggaaatacaggtgctcaccttttgaaggcttattcatacatatggttgccacaatacgtatatatgataaacagtgtatgtatacatacaagttgtttaggccaggcacggtggctcacacctgtaatcccagcactttgggaggctgaggcgggcagatcatgaggtcaggagttcaacaccagcctgaccaacatggtgaaaccctgtctctactaaaaatacaaaaaaaattagccgggtgtggtggcgcacctgtaatcccagctactcaggaggctgaggcaagagaatcgcttgaacccgggaggcggaggttggtctcagtaagccaagattgcgccactgcactccagcctgggtgacagagcaagactctgtctcaaaatatatatatatatatacagttgtcacaatatgtatatgataaacggtgtacatatacacataaaatgtttatggtggatctagctcccccctaaaaaagaagcccagatactgaaagacactcgaattttcctaaagacttgagggtgggctcgaccttagggtctggatgctgagttttatgtaaatatctacctgtggggcggggtgccatggctcatgcctgtaatctcagcactttgggagactg[136 bp omitted]gaggcaggagaattgcttgaacagaggaggcggaggttgcagtgagccgagatcgtgccattgtactccagcctgggcaacaagagagaagctccgtctcaaaaacaaacaaacaaacaaaaacaaactacacatgtggctatctgtgtttagcaaactaggaaaatctttgttttattttatattttactttttttttttttgagacgaagtctcgctctcatccaccaggctggagtgcttcccaaactgctgggattaaaggcgtgagccaccacacctggccaaactaggaaaatcgtaagaatggctcagtggggatttttttgttcctttgttttggtataattatcctcattttttttccaaatcttcaagcagggtttctcaaattttggtactattgacatttggggccaggtaattcttgggggcagtggggagatgctgccctgggcaccggaggatgtccagcaatatcgtctacctactagtagccagcagcaccgcaccaagctgtgacaaccaaaaaggtcccagacattgtcaatgtcccctggaggacagaactggccctgttttacaggaagataaatgtcccctaatccttttgtgtaaaagggggaatgttttttacccttagaccggataagcaagaccagctgagacctactggtataaagcatactgcctgctcacatggtgagaactcaataaatgtttgtatcactacgtaatgagagatcccgagagatgtcactttccaacaggcacagcagagggtgaaagagttgttattagactaaaaacaaaaaaagagacacaaatagtcggatacgtccagataacagctgagatgtcagagggaaccatggcaatgatcacagaagagcatggaacgcagccagggtgacttctaagagcacgactcaggacagaattgaccaggaggccaagacgacagccccgagggtgggctgtggccattgtgctttgggactaggcctcgggatgtggaaataggcaatcctaagcccagctaacaccacactgtcctttccaggcttcaaggcgccattcacagatctgaacgcaggtcatcctgcttcccttgagagagacaaagtcctggtggccggcacaagaggcctggttcattcctctaaagagggtgtcagctcaggacaatatgggcacaggccctgatcgctgggagtgggggtggtggcttccagagacctgtctatagcagggaacaaagtggcccaggaattcctccaagacctctgaggacatctttcctgctagggagcagtactctatggtgctctaaccaagcaggtgaaggtctgacgcctgctgggcaaggtctaacccagggccaggccatctgatttcaaagtgctggggcaagggggtgggactgttctcagtgacaactctaaaattcgtctggattaaatctttctccagggtttaaccatcatctggggtgtagagatagaccctaagtatctatatccctaaacaaccactagggttgttactttttttatttattttttgagacagggtctcactttgctgcccaggctgaagtgcagtggcacgatcatagttcactgcagccttgaactgctgggctcaagtggtcctcctgcctcagcctcccaagtagctgggactgcaggtgcacatcaccacacctggctaactttttcatattttgtagagatgggatctccctatatcgcccaggctggtcttgaactcctgaactcaagggaacccctgcctcagccttcaaagtgctgggattacaggcatgagccacagcacctggcagggtccttacttttttctttccaggggcaaaggtacctgctgggtgttactggggactcgtttctctttgctcccactgggcatctccgaactgtgggcagagaaccctgtttgccaccttggcccaagcatttgctaagatcattgctcattcctcggtggactctatctacacaaattccacacaacctcaccctgcagtacacggaccaataggattcaacaatctgaggcttcttgtctttttttttttttcaagacggagtctcgctctgtcacccaggctggagtgcagtggtgcaatctcggctcactgcaacctctgcctgccggattcaagagattctcctgtctcaccctccttagtagctggggttacaggcaaaaatacaaaatttttgtattgttagtagagatggggttttgccatgttgcccaggctgctctcaaactcctggcttcaagtgatccgcccgcctcggcctcccaaactgctgggattccaggcatgagccaccgcgcccggccaaatttgaggcttcttgcattcgaaattgcaaagtgaaaattttaaatgtgcccagttttctggagagtggatccacagctttcaccagattcatgagcagtgggccctggagtttccaaaaaaaaccctttatctgtccatatcaaatgcacttaggctgggatgcagcattctacttctgggaattcatcctataaaactaatcccactggtgagcaaagatattcactggctatttattgtagtaatggtaacagaaaattccggtaaacaatagagatatctatcaactgacaactggttaaataaattatggtatatgtcatggaatgaaatacaatgtacccattaaaaagagccaagtaggccaggcaggtggcttacgtcgataatcccagcatgttgggaagccgaagcaggcggattacttgaggccaggagttcgagaccaccctggggcacatggagaaaccctgtctctgctaaaattacaaaaagtagccgggcgtggtggcgcatgcctgtagtcccagctactggggaggctgaggcaggagaattgcttgaacacaggaggcggagcttgcagtgagccgagattgcaccactgccctccagctggggcgacagagcatgactccctctcaaaaaaaaaaaaaaaaaaaaaaatccaagaagtgtggagtatggtctagagcagtagtcctgggggacaggaaaggaagggaggaaggaaagaagagaagggagggagggagagaggcaaggagggagggaggaaggaaggaaagaaggaaggaaggaacgaagggagggaaggaggactgattctaaggggacacacggtgatgtctcaagatatttttggttgtcacgacttgggggtgctcctggcccggagtgggtggaggccaggggcgctgctcagcaccccgcagtgcccaggacggccccaccacggagaacaatccagccccagatgtcaacagtgccgacggagggggagaaatcccgctccagtgtgatctccaagcaatgaaaaacacagcacacaggattctgtggcatatgctatcacagggtacgtgtttttaaaggaaaggcacacacgtatcttaggaaagggacatacggagtcgatgacagtcgcttgtctctggggagaagggctggctgcccgaggagcagagaggggaaactgacttcttcctctaccttttcaactttgtaccttgcccatccagaggattttgaacgtaactgctctagacgcaacttttccctggctctgggttatctggcaagagtcctgtgtcgacagcctcgggactcctctcttccccttctctccccgcaccccgcctttgcagcggagagaaggaggggagaggtccgcgtccctgggcagcccagggtgcctctcccctcctcccaggggctctgtccccgcttctggagcccgcatggcgggcagggcctgggccacctcgtcgcccccgtccgtcccttggtcttcccacctggcaggggacacgcgccaacgtccccacctcggtccccccggccccctcccgggccaggtcgggcctggctccctcatccgggcagcccggggcccggtactcggctcccgcctgggcctgcgctcacctggctcgccttgtagaactgcttcttcagccccgccaccgacatgctgccgcccgccgccgagcctcccgcccggaccgcgccagcgacaggctcccgggcgccgccgaccctctgcgcgcctcagcagtccccgtcggcgccgcctccgccacccgcttgccagctccgcgcccgccccggcgccgcctcagccgctcgcgcgcccgcgcggccaggatattacatggcaaccgcacgcttccggtgccggcccccgcgcgcgcccccggcccccgcgcgcgcccccggccccgtctgcgcacgcgcgccctctgccggctgaagagcgcacgtgcacattgtctaccgcgggagaggccgcctctgtcagtgagttgagcggggcgagcctagaggggccgtagcagttgcagcgccccctggagtcgtggaggtgaccctaacgtcttggaaaacgcgcttagtttaaacctggccagggaggttgggaagtagaaggggcccctgcttacgattcttcagattcctgtttactcatcttagctaaatccagttcgtctaagtgttcagccccctcccatttttatttatttatttattttttttttgagacggagtcttgctttgtctcccaggctggagtgcagtggcgtgatctcggctcactgcaacctccgcctcccgggttcaagcgattctcctgcctcagcctcccaagtagctgagattacaggcgcgcaccaccatgctaggctaatttttgtatttttagtagagacagtgtttcgccatgttggccaggctggtctcgaactcctgacctcaggtgatccaacccccaacccccccaccaaatccagcctcccaaagtactggtctcacaggtatgagccaccgtgcccggccacctctcttcctctctctctctgtcctgtgttcatccattcagttgcccacgtgacacatctagacatctaggtctgtcttcatgccttgaccatactttccaccagtcctcccctccaattcttcc[140 bp omitted]ggtgaaaccctgtctctactaaaaaatagaaaaaattagccggacgtggtggcgggcgcctgtggtcccagctactagggactccgtctcaagaaaaaagaaagaaagaaaggaaggaaggaaggaaggaaggaaggaaggaaggaagaaagaaagaaagaaaacctgtttctacactcacaggctgacactgaagttctctgttttgtgtgaggcttttaatctgcttgatctacacagttcaatcaaatatttatacattcactcaaacatttattgacctggtaaatatgatcagttactaacaggtcctggggttccagtgaggaatgagtcctaccctcgccagaactaatgacaaaaggcagaaattaattcattagtcaaataacaaactaataaatagacacagctgtaattgctttaaggaaaagaacagtgttgtaggcacttgatattgtcagggttggggaagaaaaggcttcctggggtgacgatctaagatctgaaaagtataaattagccaggaaaagagctgcgaaaagattgttctaggcagagaaaacagcatgtgccaatttcctgaggattaaaccagaaacgatccatttcgtccatttcgttcactcattctacatgttatttactgaatgtcaaatacttccgaagcgctccccagacttcgttttattgttcttgtagaaagcaatttataattttaattgctgttgctatatttagccgatgtcccattaggataaactcaaaactccaggttcctcatctaaatcccactttcaagttgtcatctgcgccttgcgtaaaatgttctggtgacgtaagagcctgggcctccctcctcttagggactatcccacgcgatcagccagtcgcagcgcagagcaatgagcttgacacctccttcctccaatcgcagggcagctcctcccagccaatgacaggcctccgaggggaagcccagtccctcgcggatatgtcaatgggcgagccctgggaggaatggaagtcacggatctcgcgaggatgcccccggcgcccctcaattcccgaggcgggccgtcacgtgacccgggctcgcccaattggcgcgcggactgcgggggtcgccgcggttcccgccaaatacgagcgcggcggccgcggcggcagcagcggcgcgggcgggagggcgaagagcagcggccgcctgaggggagcccgcgcctccgccgcctgagaggaggtcgagctgccgccggggcgatgctggaggagctggagtgcggggcgcccggcgccaggggagccgccacaggtcggttcgggcccgcgccgaggggaagggggggcgcggcgcgcggcctggacgggccgaggcggcgatgggaggcggacgggcctccgggcgccaagcctggtcctgcgggccgggcgttcaccccctggggccttctcatccccagcgagggcctggcgtccccaagggcacccttgttgacgttattgttgtagccgcgaccatattgtttgtttccggcgcttttgcgtcagttcgtccctccaggactctctggggcggtgggtcggaggggccgagaggggaaactgaggcccagggaagcgaaagggcttgccctgcaggttactggatgcgtttgtgtcccttgaccatgttggaccttgcagcgggtggggaaactgaggcccaaggtcgcacgggctcggggaccagtaccgatgccgctgagggtcggggtaagcccgggtaagaagaggcccagatggtagagatggccaggagggtgggactcccgagttcttgctccttcctgatatgcaccgtgacttcctcctccgtgtgccttggaatggggtctttggagcccaccacaggcctcctgaaacgtgggagggtgaaccaaggaagaccagactgtccctctcccttgctggactctgcattacataacgctttggcagcacttggcattacgctttggcacatagtaggtgctcagtaaataacgtgaacgaatgaagggctagaatggacgccagtccagtttctcagcctcagcagtgttgatatttgttgccgtcctgggcacggcactgcagggtgttaagcatcatccctggcctccgccttttgcaggccagtagcagcccctctcaccatgccttagtaacagccagaaataccattgccctgtgtcccctatggggcagattccgccttggctgaaaatcatggctgtagttccttctagcctgtgggatttcccggagacataaaattaatataaagttggtactgtcgtggagctgtgatgttttaagtcaggatgtttaactttatttatttatttattttgagactgagtcttgctctgttgcccaacctctgcctctctggttcaagcgattcttctgcctcagcctcccaagtagctgggattacaggcctgcaccaccatgcctggctaatttttgtattttttagtagagacggggtttcaccatgttgggcaggctggtctcgaacttctgacctcaggtaatccacctgcattggcctcccaaaatgctgggattacaggcatgagccaccatgcctggccaggatatttaactttaaaaaaaaaaatcgctactcgctaggaccatgctatcatgaaaggaaagtatattttagtgccaaataaaattagaaaggatgtaatcgcagaataaagagcagttagtaactttatacacacatatgtgttaatcgtgtgtatctttggatctctggattgggagtgtcccgttttatatacaagattttttaatgagggtgggtcctgtttttaatgaggttgtttctgttccacttgcaccaaagctagtgactcaaagccacacaaatagatttttgtgattgtctcgaaaataaagttaagtgactaaaaatcatatccttcagttagggggtagaaatccatggcttttggtaagtggacacttgagaatgatactgtctttatttctttgaagtggctagaaaggaaacatgaattttctcagtaccttttcttattcactaagcttggggcggtgggtgaggggtggtttcatgtatggacgatggagttttttaggaagccccagtctgcttttaaaaagtactcacttttatgtaatgcttacaaaacatacgtagattaaccaaaataactaaactaggttttgccaagccagatctcctggtaagtgtgagcttcctaaacttactctgtttaaggtatttatctaaagactcgcttctatttatgatcactgctgcatctgctttgatattattagatggtttcttgagattttttttgcaggaaaatattttgtcttatcttctcttgacagcacttcagctcctgcctggcaagctcaaagtgctttaaattgtggtaccttcatgaattctctttaaaaagaaaaggatcccttttctgattttacagatttggtggtggtatgggggcttgggttggaggaagatgtttggggatcatgggaatgaaataggtaatctgatgttttctctcctccctacttttactcattccactttcatttcatgaaacagttccggttactctcttagttggctttctgatttattccagaccctaaccaggtaccataggtgcagcatggaacaagtctttctgctgtcatagagttggcattttgtttccagagagacgtaataaacacgaaagtttcagattaaatgccacaaagaaaataaaacaagacatgacagtgtctagggtaggatttctcaacctattaacattttgaggccaagcgccgtggccagcactttgggaggctgaggcgggtggatcacgaggtcaggagttcgagaccattctggctaacatggtgaaaccccgtctctgctaaaaatacaaaaattagccgagagtggtggcatgcgcctgtagtcccagctacttgagagagtgaggcaggagaatcgcttgaacccaggaggcggaggttgcagtgagctgagactgtgccattgcactccagcctgggcgacagagtgagactctgtctccaaaaaaaaaaaaaaaattttttttttttggcccatataattcttcattgtggtgtgctgtgcattgcattgtgggacatttagcagaatccctggcctctacccactggatgtgaatagcatccctttgagccctccctgcatcatgacaaccaaaaacatctctagactgtgtcaaatggcccccgaggacagaggggtcagaattgcctccaccttgtacataattggctctacatatgtatttgctaacttgattatttgcagaatttaacagtttaccctttgacacttttatttgcagccatggattgcaaagatagaccagcttttccagttaagaagttaatacaaggtaattatttggaaatgggttaaagagttgttcgtagtttatagtcttccttgtctcttgttggagacctcagtggaagcctggagctagaggggagagaaacagtccttcttcagaccaggaagctgggaaaatgcttttcacacagtaatgtctcgtggggttcccacaagtaaaccccgaggcctccacttatgcacgattggtgttttgtaacttgcagctgggagctctcctgtatgttgtagggagcgtagcagcatccctggcctcttcccaccggatgccagtaagtgcatcctccaagtcgtaacaaccaaaaatatctctatacgtggctgatgtcccctgggaggtagaactgccccctcagagaaccactgttgtcctggaagataaatgctcccaaatccttctgcataaaacggggagtgtgttcacccttgggccagatgagcggttggattgtaatttttttttttttttttttgagacggagtctcattctgttgcccaggctggagtgcagtggtgcgatctctgctcactgcaacctccgcctcctgggttcaagcaattctcctccttcagcctcccaagtagctgggattacaggcgcgtgccaccacacccagctaatttttctatttttagtagagatggggttttaccatgttggccgggatggtctcgatctcctgaccttgtgatccccctgcctcagcctttcaaagtgctgggattacaggtgtgagccaccgcacccggcccagattgtatttttagaaactacagttttgggtttttcaaacttgggctgggtgcagtgttgcatacctgtaaaaccagctatttgagaggctggggtgggaggagtgcttgagtccaggagttcaaggctgcggtgaattataatgacaccactgctcttcagcctggatgacagaggaagactctgtctcttgaaaaaaagggggacgccagatgctaggctcacacctgtaatcctagcactttgggaagctaaggtgggcggattgtctgagctcaggagtttgaaaccagcctggccaacatggtgaaaccccgtctctactaaaatacaaaatagctgggcatggtagggggcacctgtagtcccagctactcaggaggccgaggcaagagaattgtttgaacccggaaggaagaggttgcagtgagccaagggtgcgccactgcactccagcctggtgacagagcaagactctgtctcaaaacaaacaactccccccacaccccccccaaaaaaaaacaggtttttatttggtctattacatgatgaaatagttaataaaagatgcaatggcattgaagtaagtgaacataggttctttgggaaattcactctccaaagtgtttctgtgttcctcctaaccagcccgaagcctggcagactctgggagaacagtttgattgatgagaaaagcctaacagagcctagggtgctgaggccaggagaaaaaaaaaaaaccctgtccacaaatgtgtctatattttctacttgagaaccagatgcagttattatcaaatgagattttcacccattaaaaataaatttggaatatgaactgcatctgaaataaacaaatgtctcttgaaattctggcgatggctctgctaaaaggcttgtcaggattttgttttttaagttaggatgttgaagcggggcatggtgactcacatctgtagtcccagcaccttgggaggtggaggcgggcagatcacctgaggtcaggagtttgagaccagcctggccaacatggcgaaaccctgtctctactaaaaatacaaaaattagctgggtgtagtagtgcatgcctgtaatcccagctacttgagaagctgaggcaggagaatagcttgaacccaggaggtggaggttgcagtgagctgaggtggcgccattgcactccaacatgggtgacgagcaagactgtctccaaaagaaaaaaaaataagtaaaattaggatgttagaaaaggatagaatgaaaagatagcaccccccaccccctctttttttttgagacgaggtcccttttgcccaggctgcagagtagttgcaccaccacagctcactgcagcctctacctcctgggctcaagcgatcctcctgcctcagcctcccgaagtgctgggattatagatgtaagtcagtgtacctggcttcagatagcccctgccccgtcttttttttttttttttcttttgagagtttcgctcaggtcgcccaggctggagtgcagtggcgtgatctcagctcactgcaggctccgccccccgggttcacaccattctcctgcctcagtctcccgagtagctgggaatgcaggcgcccgccacctcacccggctaattttttgtacttttagtagagacggggtttcaccgtgttagccaggatggtctcgatctcctgaccttgtgatccgcctgccttggcctcccgcacccggccttttttttttttttttttttttttttttttgagagggagtctgtctctgtcgcccaggctacagtgcagtgttgggatctcagctcacttcaacctctgcctcccaggttcaagcgattctcctacctcagcctcctcagtaactggtattacaggcgtgtgccaccatggcctggctaatttttgtagttttagaaaagacggggtttcaccattttggtctggctggtctcaaactcctgaccttgtgatctgcttgcctcggcctccccaaagtgctgggattacaggcatgagccaccacacccggcccagatagtccctttttaaactttaaaattatctcccacccccatgtcccaacaaatcagtaattttcaagctcatgagtggttgtaactttaaacgttcactagagatggctttctgtctttgtttcagcccgtctgccgtttaagcgcctgaatcttgtcccaaaggggaaagccgatgacatgtcagacgatcagggtacttctgtgcaaagtaaaagccccgatttagaggcctctttggacaccttggaaaacaactgtcatgtgggttctgacatagactttagaccgaaacttgtcaacgggaagggtcccttagataactttttaagaaatagaatcgaaaccagtattggccagagcacagtcatcattgatttgacagaggactcgaatgagcagccagacagtcttgtggaccacaataaactaaattctgaagcctctccctccagggaggcaataaatggccagcgagaagacactggggatcagcaggggttgttgaaggccattcagaacgacaagttggcatttcctggagagaccctttcagacattccttgcaaaacagaggaggagggtgttggctgtggaggtgcagggaggagaggcgactcccaggaatgttcgccacggagctgcccggagctgacgagtggcccgagaatgtgccccagaaaggagcaggacagttggagtgaagctgggggcatcctgttcaaagggaaggtgcctatggtggtcttgcaggacatcttggctgtgagaccaccgcaaatcaagtcccttccagccacaccccaaggcaagaacatgacccctgagagtgaggtgctggaatctttccccgaagaagactctgtactcagccattcgtccctgagctctccctcttccaccagctcgcccgaggggccgcctgctcccccaaagcagcacagcagtaccagtcccttccccacctccacgcccctccgcagagtgagtatctcccatggagtccctgcacatcagtgctcacggatctcagagcgctgtcagtctccactgggtcacccaggtgttttgtggcagagtgagcggggccacgggctgggtcctgggactcgacgtggagttcttcctggtatcaaaactcacagtgttcagttctgcattcgttgtgatgcccctgggacttaattcatcaacagtgtacctggtgtactgtgtgaataacaccctgctgttttgccttcgttgttcacatctaatcagtgatagcttagccgttttagggaattaggatctgagctggtgctgtaacccctcacttcagattcgaggtccagctttctctgtgcccttcctgtctaagcatagaaatgtagggacggggctgcaaagacactgagcactgaagtggcagtgagacggcaggaagcatgacttggggaattctgtagggtcagcacagccagccatcttaaaaaccttacctggggccaggcacagtggctcatgcctgtcatcccagcactttgagaggccgaggtgggaggatcgcttgaagatcacttcaaaaccaacctgggcaacatagacaccatctctatgaaaaaaaattacttttttttttttttttgacagagtcactctatcacccaggctggagttcagtggcgtgatctcggctcactgcaacctccacctcccaggttcaagcgattctcctgcctcagcatccctgatagctgggattacaggtgcgcaccaccacacttggctaatttttatatttttagtagagacagggtttcactatcttggccaggctggtcttgaatttctgacctcaagtaatctgcccgtcttggcctcccaaagtgctggaattataggcatgagccactgcacccagccctgcaaaaaaatttttaaaagttatccaggcatggtggcacatgcctgtagtcccagccacctgggaaactgaggcaggaggatcacttgagctgaggagttggaggccgcagcgagctatgatcacactgccgcgctccagcctgggtgacagagcgagaccccatctggaaccatttttaaggaccccataagggggacttttgcatggtctgtctctgttattgattttttattagcacaatggtgtccttaaggtcttagggaccaaactgataaaatcagtcacgagtcccacggtgtttagtggtgtcttttgattttataattttttactttttatcttaagtatgtagaaccagaagagacagtgcctttttatgtttttggttttgtagcacttttgtttgttcatgttgggtctttatatgagagtagtagatcctgagatgggtcatttaatctgtacctgtaagcaggtacagtagaccacctggaccataaaccaccaaccttgttcgctttcgggattttgagctctaaggaaccatttatttatttatttttgagacagagtcttgctctgtcacccaggctggagtacaatggcgccatctcagctcactgcaacctccgcctcttgggttcaagcaattctcctgcctcaccctctcaagtagctgggattagaggcacccgccaccatgcccagctaatttttgtatttttagtagagacggggttttgccatgatggccagactgatttcaaactcctgacctcaggtaatccacccgccttggcctcccaagtttctgggattataggcgtgagccactgtgcttggccaagagcatttatttttctgaatgacttcatttcttgtctttcacctgagaagatgaaaaaggaaaaaatggcttcctctttaggtttatgaaatgttgtaaaaatggtgcaaatctttttttttttttttttttttgagacatggtctcaccctgtcgcccaggctggagggcaatggcatggtctcagcctactgcagcctccaccttctaggttcaagcgattttcctgcgtcagcctcttgagtagctgggattacaggtgcccaccaccacgcctggctaatttttgtatcttttcagtagagacgggtttc[133 bp omitted]atataggtaaactcttgtcgtgggggtttgttgtacagattattttatcactcaggtactaagcctagtaccctcttctaagttactaaatgtgccagactggcatgtacacatttcagcttctacctaatccaccactcaatctcccaaaatcagagttgaagtctctccccattgggcatcctgtagtgtacattcgatcacttgaatttcttccaggctgctgccgctttgcaaaatttcgtcctgtgatgtgagccatttagcaagaacgggacacatggctgggcgcggtggctcacacctgcaatcccagcactttgggacgccgaggcgggtggatcacctaaggtcgagagttcaagaccaggctgaccattatggagaaaccccgtctctactaaaaatacagaaaattagctgggtatggtgacgcttgcctgtaatcccagctacgccggaggctgaggcgggagaaccgcttgaacccaggaggcagaggttgcggtggcctgagatcgtgccattgcactccagcctgggtaacaagaacaaaactccgtctcaagaaaaaaaaaaaggacaggacacaagcacatgtttccattaagtttgtttccatgtccacagcttagtctgcaaactgggaagtcccctcgttgggcatcatggtggcacaatcctgcccgctttctaaaacaactgagcacatgaacccagtgtgcaacatttaggaaaccctgcatttaggacgctagatcttgttctgaacacagactcgaggttttgggatgcacttgaaggcaatattatcccaacttttcagataatttacaagtggtaaaggcttcaggctggcccagagcctatggcagaaagcggccacaaccacccgcagagggcctgtcagtcaccgaagctatgagggaagcgattatcgggaggcctcctcatgccctgatggcagggatccctgagatcccagctgagagagactccatccccaacccctactttatctccgaacctttaaggagtcctgcatttctggtttggttggtttgcttgcttcatagttggtacctaactcttttttattttttattttttttgaggcggaatctcactcttttgcccaggttggagtgcaatggcgtgatcttggctcctgcaaccgctgcctcctgggttcaagcaattctcctgtctcaacctcccaagtagctgggattacaggcacgcgccaccaggcccagctaatttttgtatttttagtggagatggg[135 bp omitted]ttgccgtgacgtccaagccacccccttcccacaacccctgttcctctggggaatacactgtttttgcactttacctccctaccagcagctctttccagattgcaggggcgagctggtgggaagcttgcagattgtttcgcactgccgtgtaatctgtgtgcttgtcactggggtctgttcttccttgagttggtacagtgaaatatgcattgagagtcccagggcagtcattgccactgtactttgtgggctggcttgccttctttattatttcttctttaaaataaaagaaaatgggagtttgttccgatacaggtcctgctgtccctttgcagggagcttcatggcgtgtttttgtttgttttggtttttgttgttgttttagtactgcaggatctggagaatctcactttggagaaacaatgatttaaaaagatccccctttagatactcccagggtcctttgaatagctgaagtgttcctttttagtattagagttttctaccatgtgggaaagaaccatttctgaagtttgcaatcagacttgtgatttagcctcttctgttagtgatcgagatgattatttgacaaatgatcatgttggtgcagttgtgttactggaatctttggcttgcttctgtgcccagattgctggaacttctttccatatacttgaaattacatttgtaataaattctccatgtttaaaagaaatactggtctaggtgcagtggctcaagcctgtaaccccagcactttgggaagccgaggtgggaggattgcttgagcttaggagttcgaaaccagcttgaccaacatggtgaaactccgtctgtacaaaaaatacaaaaaatagcggggcatgggggtgcacacctgtagtcccagctccttgggaggctgaggtggaaggatcacttgagccaaggaggcagaggttgcggtgagtcatgattgcaccactgtgctccagcctgggcaacagccagaccgtctcaaaaaaaaaaaaaaacaaaaaggaaaaagaatggaaaccttgaagccctctgttctcccaggaggttgccattattatcatcatcatcaccttgtgtttttctgtgtcctgtatatccagagagatctctaggaaacacccagtatcattttgtttccttgtgtatgacatatactgtaaatatctgtctttgttactcaagggtgtcttagatgttttttatattgggatggaaagatggagctctttttaacagctgcgtgatatcccatggtgtggacatgctgtaggttacagagctgttttctcagttctgctgtttctgtgcttggctttcacaaaatgattgttcccttgagcttccttctacaagtggccttgggctgttaaggagaatgaggtcttggtagctcaaggcaatgcgtgcgttcttattttcccagcttgcactctctcatgcttgggccaattggaggttttctcttttcccccctgcctccgctcccctgctgtcaggttttagcggcttatctggtctgggcttagaaattagataccctttagtataaaatcagagtccataggctctgagaggattatctgagaaagggtgcaggaattttcatgcccacacatagtgagctctgtcgcgactccttgggattgtcggtttttgtgttttggcttccttctgggatcctggatcacgtttttggcagttgagggtgctgtctgaccgggctccagctgggtagaatgtgggagtgttgcatagaattttgagagtgagatctataaacacttgggtcaaatttcaagaagataaagttctgtcagacttcaaggtccatctgagggtttggcaaagcaaaaaagataccagttttaaattaagcagtaattgctctgttttggttgttggatattactgagcgggctcttgccagtcacatcaagtctgttatctctggactcacagcagagggggggcattgtaagaggcaggagattctgcagctgagcttcaggcatgggcaagactaaggaactgaattccccgccaccccaagaccacattccgtattataatctctgaacacaaagggcagccccggagagctgcggctcccatattctgcagttaaatccctcagcgtgggggagaggcacacagccttggcaggcagagtagatgctggagagacagatgctttttctgcagcatttggtgaggctgcctcgggctggcatttctgttgccacattctcagcaaagactgaacaccctggcctgatctcggtggtgaaagagctcctgccaacacgggcagccttctcacaacggctcggcctttccctaaagaaaggtttagtccagaaaggactcagtgggacccaggtggaaaggctgtcttgagctcattcatctgaagcttttattctgtgagaggtcctagtcaggggttcagc[170 bp omitted]ggtggtgggcacctatagtcccagctactgggcagactgagg[139 bp omitted]accattgccaggaaaatgggcctttggtttttcagtcaacttcagtcttacactgcaagtctgcaatgaacccggagaactatttcttcccactcttaagcgtctcttcccattgctcttcacttctactagtttggttttcaggattccctgccccggtgggagatagcttaggccaaagtccagactccctgttcgtcttccttcctgggaccatttaggtggatggtgagtcacaccatggatcctattggtaattcctagtagctcatgctcagtttgaaggtaggtgatagaaaatattgtgccctagaaggtagaagtcctagaaaaccccagcaagtttcccttttgtcttaagctttcactccacattctaaaaagcagagttggctgggcgcggtggctcacgcctgaattcctagcactttgggaggcgaggcgggtggatcacctgaggtcaggagttcgagaccagcctggccaacatgatgaaacccctatctccactaaaaatacaaaaattagccaggtgtggtggcacacgcctataatcccagctactcaagaagctgaggcaggagaatcgcttgaacttgggaggtagaggttgcagtgagccgagatcgtggcactcgctgcactccagcctctgtgacaggagtaagactccatctcaaaaataacattaaaataaaaagcagagttgagctagacagaatgtaaattagtggtgcacaggaaaccagcctggagacatgttttatttgattaatttagtatctttttattttttttttagacagtctcactctgtcacccaggttggacagctcagtgcagcctcaacctcccgggctcctcccaccccagactcctgggtagctaggactacagatgtgcaccacaacacccgactaactaaaagctttttttagagacagggtcttgctttattgcccaggctggtcttgaactcctgggctcaagtgatcctcccgccttgacctcccaaagtgctgggattacaggcatgagccactgtgcccgtctgtgtccatttttaaacacctaaaaaaattcatatgaaattcctaatatcagcttctcttggagaaattggaaggaccagcaaatagggatctatattcctgtaagaactccatctcctttggacaggcaggtcctctctcctttgctacaaatccatcctctccctgtcgcccaggccagctgtcgctttttttttttttttttttttaagacagagtctcaccctgttgcccaggcaggagtatggtggcgcaatctcggctcactgcaacctccttctcctgggttcaagcgattcttctgcctcagcctcctgagtaggtgggattacaggcacctgccaccacgctcggctaatttttgtatttttagtagagatggggttttgccacgttggccaggctggtctcgaactcctgacctcaggtgatctgtctgcctcggcctcccaaagtgctggaattacaggcgttagccaccgcgcccagccttgtctgttgcctttatttctgagcttgccttgtttttcttgtgcttggtgtccttcactcatttctttatctgcctccgtagtctctcttgttatctaatcccagatacacacatgtatgcacacttactggagtttgtgaccctattatgacattttggttctgttggtggaaaaactgatcacctggaaaggtttctctttttctcgaagcaattgaaataacccgtgtttaaagataaacgtcttctgttttcagataactaagaaattcgtcaaaggctctacagagaagaacaagctcagactgcaaagagtaagacattttccctgaaatagaaaattaacctgctgtgctttttgcattaaatagtaagcaaagccctttgaagttcctttggtctagtttttacattttccccagccttctctgaccatcattttgattcctgcttcattttaagtacttggacttcatggtttgtggattgtgtcattttttggcttgctgagtgagtcctaaggttttgtgtgtggccttttctaagcttttatcaatagtgctaccactgtcttaatggttcagtatcccattgtag[143 bp omitted]cctcccaggttcacgccattctcctggctc[175 bp omitted]cctggccagtcctgtgtctttcacttattgctaagtgctataacatctgaatagcctctacactcgatgggtggttatcctttagtgactctctgcttagtctcctattctgtggggggcatcaccacgttttccacacagcaatgcagggggcttttgttttgttttgtctttgagacggagtcttgctctgtcaccagactggagtgcagtggcacgatctcggctcactgcaacctctgcctcccgggttcaagcggttcttctgcctcagcctcccgagtagctgggactacaggcacttgctgccatagccagctaattttttttttttttttttttttttgtattttagtagagatggggttcaccatgttgcccaggctggtctcaaactcctgagctcaggcaatcctcccgtctcagcctcccaaagtgctaggattacaggcctgagccactacacctggccgcaggggactttttacttattgcttaaaggttagagaaattgaacatcatgtcataccgaaacaaaccaaaactccagggaaggcctctgggctttgcctatgcagtgccagctcacaggaggggcctggtgaccatgggctctgcgtttactgagtgtttcctgagctccctgatgttcactgggcgtttcctgagcttcctgatggccacactgagtttttgtgtttcagatttggggttgatttttattttattacttttttttttattgagacacagtctctgttgcccaggctggagtgtagtggtgcaatctcggctcactgcagcctctacctcccgggttcaagcgattctcctgcctcagcctctcgagtagctgggattataggcacgagccaccacgcctggataattttttgtatttttagtagagacagggtttcgctatgtttgtcaggctggtctcaaactcctgacttcaggtgatccacccaccttggcttcccaaagtgctgggactacaggtgtgagccaccacgcccagcctgatttttatttttacagtttatctcattctttggaacaagagcacttttaaagctcattggaacctccgagtcccgcacaccgggttggggagcggagaaagtatccaacggcggctgaagaaatctgattcacctgcagtttctagaagccttctatttcctgcttagcaacagggtgggagactcttcacccagttatgtttatagtctccttgttcagtccagacggtcaccttcctcgtgtgtctcgtatatcagatgcagtcacacagcacactggcaggaaatgcacatcagacatcttccaggctgtgtctctgtggcttttgttaaagctaccagagatgtattggaacacatttagaatttttccttagagacaagggcagatatcctaacccaaactgaaagctgagctgtcaggctccagacgtgtgggaagcccatattggatgagaggtggtcctcatgcagtgttaggagcgggcacctgtggagctgggcaggtgagcgttttttttttttattttgagacagtctcgctctgttgcccatgctggagtgcagcggcgtgatctcggctccctgcaacctccacctcccaggttcgagcgattctcctgcctc[134 bp omitted]cggcttcccaaagtgctgggattacaggtgggagcctgcgcctggctgagcatgtttaacattgaacttcagattacgtaatgactgagtgtcccaggccactgccaagtctttggaatgaggaacgtagtgatgaagtgttacttccttaaagaatttgaaacaaggctgggcgtagtggctcgcccccataatcccacactttgggaggccaaagtgggaggatttcttgagcccaggagtttgagacaagcctgggcaacgtagtgtctctactaaaaagaaaaagaattcctgggctggttgcaatgggtcatgcctgtaatcctagcactttgggaggctgaggtggacagattgcttgagcgcaggagttaaagatcagtctgggcaacatagtgagactccatctctacaaaaattagccaggtgtggtgacaggtgcctgtggtcccagctactcgggaggctgaggcaggaggactgatttgagcccaggacggaggttgcagtgagccaagatagcattgctgcactccctccagcctgggcactagaatgagactctatctccaaataaataaataatgtttttttgttttgtttttcagacagagtcttgctctgtcacccaggctgcagtgccgtggcgtgatcttgaactgccttgtgggtttaagcgatccttgtgcctcagactcctgagtagctgggactataggtgtgcgccaccacattcagctaatttttttgtatttttggtagacttggggtttcaccttcttggccaggctggtctcaaacttctggcctcaagcaatttgtctgcctcagcctcccaaagtgctgggattataggtgtgagccccctcagcccagcaggattgtgttttaaatgaatcttatattgaatttcccacaagtaccaggacacagggctaattcttaacatttttctcatgatggaaggaagcataatggattatgaaaatcacttctgtggctgggtgctggggctcatgcctataattccaacactttgggaggctaaggcagaaggattgtttgaggccacgtgttcaagaccagcctgggcaacacagcaaaaccccatctctaggaaaattacaaaaatagctgggtatagtggtgtgtgcttatagcccctgctactcaggagcctgaggtgggaggatcacttgagcctgggaggtcgaggctgcagccagctatgactgcaccactgcactccaccatgggcaacagagtagactttgtctcaagaaaaataaaatcacttctgtgtaaagttgttgactggaggctcctcctggagctggtctctgaattcttatttattcatttatttttttaactgagtctcagttgcccaggctggagtgcagtggtgtgacctcagctcactgcaccctacgtctcctggttcaagtgattctcctgccccagcctcctgagtagctgggactacgggtaccctccaccacgcctggctaatttttttttttttttttattaaatggagtctcactctgtcactgatgctggagtgcagtggcaccgtgttggctcactgcaacctccgtctcctggtttcaagcaattcttctgcctcagcctccccagtagctgggattacaggcgcccaccatgcctggctagttttttttaaaaatatttttagtagagatggggtttc[137 bp omitted]cctgttgaccaggctggtctcaaactcctgacctcaggtgatctacccacctcagcctcccaaagtgctggaattacaggcgtgagccaccatgcctagccttggtccctcaattctgttcatcccgtccaggccgtgctgtcctccatgctgtgaaccgagcttcctcctgggagttggagggagggccacctgtcacttgccacactgtcttgtaggatcaggagcgtctgggcaagcagctcaagttacgtgcagaaagggaagaaaaggagaagctgaaagaggaggccaagcgggccaaggaggaggccaagaagaagaaggaggaagagaaggagcttaaggaaaaggagaggcgggagaagcgggagaaggatgagaaggagaaggcggagaagcagcggctcaaggaggagcggcgcaaggagagacaggaagccctggagtgagtgtccttggaggccatgctgggcccgccaccctgctgctggattccgctcctggccactctgatggggcctttccacttcacaggcagatggcggctcccttcagttccttcccatttctccttcgtgaggtgcccgtggggccctgacgtgggagcggtggaaagcagctccctgctctttagtgctcccccacgtccaactcaccctggaccccttgtctctgctgtgaccatccttccagttcccaaccaacttaggcatttgcattgcaggattgtgggttttgtctgtgctaattgtgctctgactggctaaagttttttatatatattctagtcacaggaagaattttattgactgttttccatttttattgtgaagacctatgtaaaagccttatactagacatgaaaataacttatattcatttaatgtaaaatgaaatacttgccatatactaacagttgagtgctgcggtcccttccagagccaaagcaaagagtcggctgaaatgtcatttgctgtctcacagggctaaacttgaggaaaaaaggaaaaaggaagaagagaaacggttaagagaagaagagaaggtagagtgtttcccacagagcttccccgtcccagcccgttggagaagcagatgcccaaagtggaattcttgccacagccgtcacctaatattctcttggtttggggaaaccaaatggcgcccgcagggagggcgagtctgtctagatgcgttcttgttgcttcttcccagtgctggctgtcacatgcctactggccctgcaatcctggcacttctacccacaagggcaacttggacattttgagattggctggctcagttgcgggtccgtgggttttgagagctgaaaatcacagtagtgccttcaagctaaaatgcttgacgttcggttctgggggcctttgcatgttttgcaacacatactgttcctcttcctctcctctttctcatcaccatctcttaacatcacagcgcattaaagcagagaaggccgaaatcacgaggttcttccagaaaccaaagactccacaggcccccaaggtgagcagccggctgcctttgcttttgggtttcagctctgctagacttttcctttctgaaagtgaaagggtctctccccagccagcttctctcattaggagggagggagcctccagtgacctagggcacttccatttctggttaagtcttgaggctcaatattttgtccttcgctttgtcccaaagaggtaaaaagtggcatgtctgattaaacagtgctgttttcagaggttacttcatgaataattttgtgttaggcgtaagagaaattcaccatgtttttacccttgggaaacttaggcttaaggagggagcacgtttagctgtaaaacaacagtacaattcacaaaggtttactttccctgcctggcgtcggtcacctggcatctcagaccttctgagccaccatctgtgcatggaaaccacagccctccttcccctttacccagagggagcccatctccaatgttaggggtccttcagtgcctttccctgctccactcactgtatttatacacatgtgtacttagctatctcagatttgtgccatgttgccacatttagatgtatttcattctttttaatgtatctggcctttatttattttttgaggcagggtctcactgtcacccaggctgtagtgcagttgcacaatcaaagctcaccacagccttgacctctcagggtctggtgatcctgtcacctcagccttcccgagtagctgggactacaggcatgtgccaccatgcctggctaattttttatttttattttttttgagatggagtctcactctgtcacccaggctgcagtacagtggtgcgatctcagctcactgcaacgtccacctcccgggttccagtgattcttctgtgtcagcctcccaggtagctgggattacaggcacatgctaccacacctggctaatttttgtatttttagtatagacggggttttaccatgttggctaggctggtcttgaactcctgacctcaggtgatccgcccgcctcagcctcccgaagtgccgggattataggcgtgagccaccgtgcccggcctaattttttaatttttttttgtagagactgggttttgctatgttgcccaggctggtctcgacgacctggcttcaaatgatcctccaaacctcggcctctcaaagcacttggattacaggtgtgagtccctgcacctggcctgtccttttatttgtatgttgagacatttgatggcaattgtgtatcctgaaggtgcacaatgtgacattgttgtacctacacatcatattgtgacagccagagatccacatcatgtattttcactgccgcataatacttcataatgcaatgatatggtttctctctttttttacaaaaattatttatttatttagagacggagtattgctctgtcacccatgctggagagcagtggcgctatctctcggctcactctaacctttgtctcccgggttcaagcaattcttctacctcagcctcccgagtagctgggattacaggtgcctgccaccactcccagctaattttttgtgtttttagtagagacggggtttcaccatattggccaggctggtcttgaactcctgacctcagatgatctgcccatctcagcctccctaattttatttttagtagagactgggtctcactgtgttgccagggctggtctcgacctcctggtctcaagcatttctctcgctttggccacccaccgtgctaggatcacaggcatgagccacagagcctgccactatctcaacctctttgcccctcagtggtgtagggggggtccctgcacatgcttctctgcacacatgcattcctctgggacagccaagtaagcatgagttcacctctaggacaaaatagcatattgctgaagcatcatgagccatggccagagtgcgtgccagatgggaaactcagatgtacattcccggcgatgtgtggaaatttcctccccattctctgctatcactgcaatttttatgggattaattttcttttaactttgccagtctgatggatttttaaaaattgacattgttttactttccatttttacttgactcttggtgcagttgagcatctttttctgttcgtttgccattttagttcttctatgacttgccaattcctatttttttacctatttttctacaggattttctttttttttctttgcctgatctgtaagttttttttaacatagtctagtatttcattctccgtgatatttcgtctcagcctgttacctctttgtttacagtcttttttttttttttttttgagacacagtttcactctgttgctgaggctggagtgcagtggtgccatctcggctcactgcaagctccacctcctgggttcacaccattctcctgcctcagcctcccgagtagctgggactacaagcgcccgccaccatgccccgctaattttttgtatttttagtagagacggggtttgcaccgtgttggccaggatggtctcgatctcctgaccttgtgatccgcccgcctcggcctcccaaagggctgggattacaggtgtgagccaccgtgcccggcctttgttgttttttgtttgtttgttttgagacaaagtttcgctcattgcccaggctggagtgcagtggcatgatctcagctcaccacaacctctgcctcctgcgttcaaatgattctcttgcctcagcctcccgagtagctgagattacaggcatgtgctgccacgcccagctaattttgtatttttagtagagacggggttttt[131 bp omitted]ccttttggccaggtgcggtggcttatgcctgtaatctcagcatttggggaggccaaggcgggtgaatcatctgaggtcaggagcttgagaccagcctggccaacaaggtgtctctactaaaaatactaaaaatacaaaaattagccgggcgtggtggtaggcgtctgtaatcccagctgctcatgaggctgaggcaggagaatcgcccaacccaggaggcagaggttgcagtgagccgagattgcaccactgtactccaggctgcgcaatgaagcgagactccatctcagaaaaaaaaaagaggagttgtgatctttcaaaaaaagaccctgtctttttttttttttttttttttttttttttttgagaaggagtcttgctctgttgcccaggctagagtacagtggcgtgatctgggctcactgcaacctctgcctcccagatccaaacgattctcctgcctcagcctcctgagtagctgggactacaggtgcccaccaccatgccaagctaatttttgttttgttttgttttgttttgtttttgagatggagtcttgctctatcccccaggttggagtggtgcagtggcacgatctcggctcactgcaacctctgcctcccaggttcaagcaattctcctgcctcaggcccaggctagagtacagtggcgtgatctgggctcactgcaacctctgcctcccagatccaaacgattctcccgcctcagcctcctgagtagctgggactacaggtgcccaccaccatgccaagctaatttttgttttgttttgttttgtttttgagatggagtcttgctctatcccccaggctggagtgcagtggcacgatctcagctcactgcaacctctgcctcccaggttcaagcaattctcctgcctcaggctcccaagtagctgggactacaggtgcatgccaccgtgcccggctaattttttgtattttagtagagaccgggtttcactgtgttgcccaggctggtctcgaactcctgagctcagacaatccacccgcctcg[134 bp omitted]cagcctcccaaagtggtgggattacaggcatgagccactgcccctggcctaatttttgtttttagtagagatggggtttcaccatgttgggcaggctggtctcgaactcctgacctcaggtgatccgccttcctccgcctcccaaaatggtgggattacaggcatgagccactgcccctggcctaatttttgtttttagtagagatggggtttcaccatgttgggcaggctggtctcgaactcctgacctcaggtgatccgccctcctcagcctcccaaagtggtgggattacaggcatgagccactgcccccggccttttttttttttttttttaagtgaggtttgttgagatataatttacatccaataaaataaactcttttcaggacatttgtgttgacaaatgacagggccagctaaccataatgaagataaaccctatttccatcactcaaaacagctcccttgtagtctgtccccccaccgccggcccttgagactgccaatctgccctctgccctgtagctctggaaactcggctctgtggacccacacagtgcctgggcttttgagtctgtgccttggccttagcctggatgaatcccaccagcaccctgctgtgtgcgtccatggtgcctcctttctcccattgctcgaagaccccatcgggtctcttcttgatttcagaccctggccggctcctgtgggaagtttgccccctttgaaattaaagagcacatggtcctggcccctcggcgtcggaccgctttccatccagacctctgcagtcagctggaccagctcctccagcagcagagcggcgagttctccttcttgaaagacctcaaaggccggcagcccctgaggtccggacccacgcacgtttccacccggaatgcagatatttttaacaggtcagagcctgaggaggtcggccttcacccactagtgatgctggaggccagcatcctgaaccctggggtccccggggtgggagctctgggtccttctgttgcttgcttcctagtgccctcgggccctgggcttcggtgctggctcaggcctctctccacctggccttcctgtaagctcctgaagtcttcctctccctgtcttcccagctcctcgtggaggaatcttatttccctgctggtctccagtgaaggataccccccaacacctcgctcttgcaaatctcattccacagaacctcccttgctaaaaatgctctggggctgcacctgggcagctgtcctccctctcaccctgcaggctgcaccctcctccatctgtcccttcagtccatgttcctgacctttctttggggacaggcagtgctgctttttaacaaatgcccatctttctagaattgttaggccagcttcacagggaggttcctgggaggtttgtgagcaggtctgtaaggcagcgtgatcctgagcctggggttttccttctcagtgatgtcgtcatcgtggagcgtgggaagggcgacggtgttcccgagaggaggaagtttggcaggatgaagctcctgcagttctgtgagaaccaccggcctgcctactggggtacctggaataagaagacggcactcatccgcgcgcgagacccctgggcccaggacacggtgagctagccccagagtgcctccgtccccgtacctcctcactgtgcccctttcctccagccccaaagacagttgtgagtcccatgtgtttcttttctcagaagctcctggactatgaggtggacagtgatgaggagtgggaagaagaggagcctggggagtccctgtcccacagtgagggggtaaggatgtgccccagctgtcttcactcacagacggcttgtgtttgagtctctgtcccacagtgaggggctaaggatgcagcccagctgtgttcactcactgacagctggtgtttgacctgctgtgtggtctgaaacctgaacgcacctcaacatccagacttccagcttctctcgaaaaatctcatctggtgacactcgcccacgtggctgctggggatgggatcccgtccgcatctgcaccgtggccccacagccccctcttgcctcctgcgggcctgctgcacaccatttcctcctgactgcccagctgctgtgacctagtgggctttctgccgatgctcaccgtgtctgtcgggaggccatgcaaagcagatgttcacagctttacatttttttgtttctttaagatggagtctcactctatcactcaggctggagtgcagtggcgcgatttcggctcactgcaacctctgcctcccaggctcaagtgatagtcctgccccagcctccctagtagctgggattataggtgcgtgccaccatgcccagccaagatttgtatttttagtagagacagagttttaccatgttggccaggctggtctcaaactcctgacttcagatgatccgcccacctcagcctcccaaagtgctgggattagaggtgtgagccactgcgcctggcctactttgtttttaataaggcacacactctgcttttctatctgatgaactcttttttttttctccttttgaggatgatgatgacgacatgggagaggatgaagatgaggacgatggtttctttgtgccccatgggtacctgtctgaggacgaaggtgtgacagaggtgagggagtgaagggggaggtcaccggctcagcaaaagttcatttctggactggtgctcagtggcctgacctgggagggtgacgggggtcccagcccaaccatacgagatttggactgcattccaagcacgcaagctcactcgtgggaacagctgggcctgaacttggtattacctgggagggtggcagacgtaggaggagcttgcaagcgaggggagccataggagcagacaccctggtgagggagcgtggccatggtctgtgggttagaaggctggaaaccacccgagctgacatacagtcagcatgcagcaagacatgtgcattgtaagtgttgagtttgatgacgtaacaatcaagtgaatgtgggcaaccaccgcccgaaataaaacagaacttccctatctctccagaagattgcccacgtctctgcaggcgaacctgcctgccacccctttccagattccataaggttgtggaactgtctttttttttttttttcttgagacggattctcattctgttacccaggctggagtgcaatggcccggtgttggctcactgcaacctctgcctcccgggttcaagcaattctcctgcctcggcctcccaagtagctgggactacaggcgtgtgccaccacacctggctaatttttgtatttttagtagagacgggagttcattatgttggccaggctggtcttgaactcctgacctccagtgatccacccgcctcggcctcccagagtgctgggattacaggcatgagccaccgagcccggcaggaacttgctttcaagcaagttgtttttggtcctgttttgttttgaaggcctgtcgtttgggaagtggggatttggtgggactgtctcatggttggactggaggcctaggcattccttgtgcatatctgaccaccgaggcctgaactgtcagtcagagagtggtctcaggccctgcatgtgtctgccagatgcctgggccatgtgggtagacacccaaccctgttaaacggctccacgatcacacattcaccagaaaattcagaggggtgttaaaagaggcctcatgggtgagttcagaaatatctgtgacgctcccaaaggagaccaggtgtgaattattccatctggaagaggggcagccagcgcatggtgtgctctgccctggccctgacactgtgggaagttttgtgcccctgtcctttcctcttgctccccagctggctggggactggttcctcaaaagagtgcccgggcataggggagcaagaaccccaaataaacttctgctttctaaaccacaaggagtgtgccgaccctgagaaccataaggtccgccagaaactgaaggccaaggagtgggacgagttcctggctaaggggaagcgctttcgcgtcctgcaacctgtgaagatcggctgcgtgtgggcggctgacagagactgcgcaggcgatgacctgaaggtactgcagcagttcgcagcctgcttcctggagaccctgccggcccaggaggagcagacgcccaaggcctccaagcgggagaggagagacgagcagagtgagtgtgggcggggccaggccacccacctgttcctgggcccagctaattccagggctgagggcaagagtcacaggctagtgggtccgtgatgcaaatgttctttccacaaataacagaggccagcccttttcctgtacatgtccgtacgttcaatgatgtccctagcagcaggacgaggcaggtcccttaattggcttgttttatcaaccaggacacaggcacagagagtgctggagtgggggctgtgctttctcaaaagccagggaggggccgggcacagtgcctcatgcctgtgatgccagcactttgggaggccaaggtgggaggatcgcttgagcctagtgcttcgacaccagcctgggcaacatggcaaaaccccatctctgcagaaaatgcaaaattacctgggtgtggtatcacgcacctgtgatcccagctactcaagaggctgaggtgggaggattgcttgagcctaggagtttcagaccacagtgagccatgatcctgccactgcactccagcctgggtgacagagcaagaccctgtctaaaaaaaaaaaaaaactcaaaaaactggggagggaccatggcacacaaggagagcagggcagtcatttgggtaggaacagcaggcatttgaagtcagccctggcaacacacgtgcccggccaaggctcacttctgggcaggtgcgtaggtgctaccctgtcttacacccgccctcatgaggccacctatccccgaagctggccatgccccaagcctcggtggcaatgagcttgtgtatgtgttttgttttttggcctgtggtgatgggtggctccccaagcctcatgcccacccatgttccctcctgccagtcctggcccagctgctgccgctcctgcacggcaatgtgaacgggagcaaggtcatcatccgggagttccaggagcactgccgccggggactgctcagcaaccacaccggcagcccgcggagcccctccaccacctacctgcacacccccacccccagcgaggatgccgccatcccctctaagtcccggctcaagcggctcatttccgagaactcagtgtatgagaagcggcctgacttcaggatgtgctggtacgtgcacccgcaggtgctacagagcttccagcaggagcacctgcccgtgccgtgccagtggagctatgtgacatcggtgccctcggcccccaaagaggacagtggcagcgtcccctccacggggcccagccagggcactcccatctcgctgaagaggaagtcagcgggcagcatgtgcatcacccaattcatgaagaagcgcaggcacgacggccaggtgaggtggggtgggcaggtgggggcctctgcagggcttttctttttttgtttgttttttgttgttttgtttttttttcgagatggagtcctgctctgtcacccaggctggagtgcagtggcgcaatctcagctcactgcaacctcctccctcctgggttcaagtgattctcctgcctt[221 bp omitted]tagggtcacagcaaaatcgattggaaggtacagaaagttcccatacacctccttccccaaagccaagccaagccacccaacatcacctcccagaatggtgcattggttacaatcagtgcacctcaggccaggcactgtggctcacgcctgtagtctcagcactttgggaggctgaggcgggaggatcacttgagcccgggagttggagaccagcctgggcaacatggcaaaaccccatctctaagaaaaaatttttagattagccaagcggtggcatgcacctgtagtctcagctactcaggaggctaaggcgggaggattactggagcctaggagattgaggctgcagtgagctatgatcatgccactgcactgcaacctgggcgacagagcaagaccctgtctctaaaaataaatacataaaacgcaccttcgttgatttatcaccaccactagggtttgttgctggtgttgagggttctgtgatttgaatgaatgttggatgctgtgcgtctacctttattgttttaaacaaagaggcttctccccactgaaaggcccctgtgctctgcccgtccaatcccttggaaatcaccaacctctctatctccgtggatcagccttttccagattgccctgtagctggaatcgcatcgtgtgtggctcctttgacttggcagtatgcgttgacagttcctccgtgtctgtttgtggcttgatagctcttttttttttcacactgaataatattccatgtggtagcatttttatttttgttcaacggttcttgaattttgcattcaagcacagttattaagcacttactgtgctccaggcactctgatcggtctctcagacacaggtatatgcagaacaccgcccggtgtaaggcacagacaggagcctgtaaggggaatgaatggctgtgtgattccagccttatgggtgcctcggaggcacaagcgcatggagccctggggtgtgtgatgggggcactgtctggtcttaagaaactctcatgcccagagagccactggcccctggcacccacccctggccatagatcggctttgttaacgttcattgcatactttttgtccttaccacacagtgttcggaagtgagtttctcttttttcttttttttcctttttttttttttttttttttttgagacagtctcgcgctgttgcccgggctggagtgcagtggtgtgatctgggctcactgcaagctccgcctcccgggttcacaccattcttctggctcagcctcccgagtagctgggactacaggtgcccgccaccacgcccggctaattttttgtatttttagtagagacggggttttaccgtggtctcaatctcctgacctcgtgatccgcccgccttagccttccaaagtgctgtgattacaggcatgagccaccacgcctgtcctggcctttttttgagtcaggggtcttactctgttgcctagtctgtagtgcagtggcgtgatcaccactcactgcagccttgacctccccaggctcaggcgatcctcccaccttagcctcctcagtagctgagagggactacaggtgcatgccaccacacccagctaattttctgtagaaacagggtttcaccatgttgcccaggctggtccccaactcctgggcttaagcaatccccctgcctttgcctcccaaagtactgggattataggtatgagccaccgtgcctggctccctgagtttgatttctaatatctacacttaacgcagacctatctgtccctgtgaaccttgggctttccttcaaggccacgatctgatggagttacaggttttcagagacttgggacaaggagcaagacagtggataacccccggccccagcttgcatcctcttctctgatgttaaaggtggtcgttggctgggcacagtggctcacgcctataatcccatcactttgggaggccaaggcgggcagatcacctgaagtcaggagttcgagaccatcctggccaacatggtgaaaccctgtctctactaaaaatacaaaaattagctgggcatggtggcaggtgcctgtaatctcagctactcgggaggttgaggcaggagaatcgcttgaacccaggaggtggaggttgcagtgagccgagaccacaccattgtactcgagcctgggcaacacagcaagattctagtcccccaaaaaaaaaagaaaagaaaaggtggtcgttaggggcagggaggcgagagaaatggctcctgagatgatgctcagccatctccctgctgccagcacacagccatgggccttaatatgctgtgaatctccctcagctgtcacagcaggaggggccatcataacatcccaaagggtccagggctacgactgaaactgttcctggcactccctagagcctctgtccctgtacagtgtgtcatgtgcatagttcccctggctctgtggaggcggcttggcgccgtgggaagctcagtgcattggagctggggccacaggaggcccccacacagagctttgctggatgcattctttgttcaagccctgtgtgagcagtgcctttccctggtcacctgagcagccttagagggaaccggagctccccagcctgaaaatgatcggggcgggaaggtactatctggttgtgtcactatgcaagcagttttccagggcctttgctgatcagccctcccctgggaacccctgtgtccctcagatgttcctttggggtctcctcatgctccacacagtagtccaggccctggacggcctccttccccacccctctccactgatttgatgcagcagctgcctctcccagctggggtgcagtgccccgcccctggtcctcccaaacactgctcttgctccctgtcaacatgtggaacccatgtttccccacccggaaaatagcgccctgagccccatgtgcccagcaccacatcagagttactgtgcttcgggggcagtgagtgcctgtttatcatccctaaccacaaggaaagaagggtgcacccagtttaactagagtgggtcagagaggttgggtgggccttggagttagcaaaacacagcatctcacctgctaatggatggcagtggtggccacatgcgcgtgattggtggcctctgctgcgtggcacaggtgagggcctcctggggctcagcagtgcagcggacgcacgaaggtcacacgtgaaggaatggagacccaggcccagcttgatgcttaacccccacccctgaacctcctgcagtttgggacataaacgtccctggggagcagggtctggtcctgtgttttttttcagagcttgtgtggggaggggcacacaggtgggacccaaaggtggggctgtggaagcacatgagcccggatgggacatgtgccctggcatcctctgtttttttttgacagggtctcactctgttacctaggccggagtgcaatggtgcagtcacagctcaccgcagcctccactcctgggcgcaagtgatcctcctgcctcagcttcctaaggagctgggagtatagaggcacgtgccaccatgcccaactaattttcaaatattctgtagagacagggtctatgttgcccaggctggtctccaactcctgagctctagcgatcctctctccagcctcctggcatttaataaagctgctgactgatgcttctgcacccaaggggagggataagccattcatctgcaagtggtgtacatccatattttttactcggttacactttttttc[136 bp omitted]ctgcctcagcctcccaagtaggtgggactacaggcgcccaccaccacgcccagctaattttttgtatttttttagtagagacggggtttcactgtgttagccaggatggtcccgatctcctgaccttgtgatctgcccgcctcggcctcccaaagtgctaggattacaggcgtgagacaccacgcccggcatcttttcttgttgttaaattagaaacagggtcttgccctgttgccctttattattttaggttcaggggtacatgtgcaggttggcaaactcatgtcacgggggtttggtgtatagatgatttattgggtactaaggtattttttctgaatttctccctcccaccgtcacataggctccagtgtctgttgttcccctctttgtgtccacatgttcttataagtgagagcatgtgatatttggttttctgtgcctgcgttagtttgctgaggataatggttcccagcttcatccatgttcatgcaagaagaggtttttttgttttgttttgttttgttttgtagatattgggtcctgctgtgttgcccaggctggtctttgaacttgtgggctcaagcaatccacctgcctcggcctcccaaagtactgggattacagacctgagccagggagtctttaaatctttttacttagagctcaaaagagatattcttaaggcattctgacctagtggggtgaagtgccatgtatctgtgaagccctaggacacctcaactcttcgggcctccgttttatttaaaaattttaaaatacaaggaaggatgtgtttgcccttgccaacaaaacattatg[132 bp omitted]aaacccgtctctactaaaaatacaaaaaattagccaggcgtggtggcggctgcctgtagtcccagctactcgggaggctgaggcaggagaatggcatgaacctgggaggcggagcttgcggtgagccgagatcgcgccactgcactccagcctgggcaacagagcgggattctgtctcaaaaaaaaagcatagatggctgggtgcagtggctcacgcttgtaatcacaaaactttaggagaccgaggcaggcggatcacttgagaggccaggagttcaagaccagcctggccgacatggtgaaaccccatctctaaaaatgcaaaaattagctgagcatggtggtgcacgcctgtaatcccagctactcaggaagccgaggcaggagaatcacttgaactcaggaggtggaggttgcagttgagccgagattgtgccactgcactccagcctgggcaacagagcaagtctgcgtctcagaaaaaaaaaaaaaagacaaaaaggcacaaatgttagtgacaccatcttcatcccatgtagtcgttaaacgttttcctgactcctgttttccgtagtctgcgctcctccgtgtctgtgtttagcacttgcagtgctgctggcgagatgacagctgtccccgtgaagcaagctgccggcagctcagcacagtgggactcggtgttatgtgttaaatcctgtcttcagcctagagggtgaagagtggtgattgctctgaaaaattttggatccaagaaaagcctaatgtgtcaacgcgtctcctgtgtggagggagggcccagtgacttgaggtggctctgaagaaattggcatgttcttttgtttaacgtccccagacacctccagatcagaatgtccctcctcagcagcgtctacaggggactcttagactcttctttgcttaactattctttcaaaaaggtagttgaaaatggccgtaggccaggctcagtggctcatgcctgtaatcccagcactttgggaggctgaggcaggaggatcacttgagaccaggagttgaagggtgcagttacctgtgattgcaccactgcaccacagcctgggtgacagagcaagatgtttctcctgtgtcctcacagggtcaacccatgctgcctggggagagggacagcctgggctcccagccactgaagagaggatccaggaggggagcccctacccaggaattgatgaggctacggtaggaacccagtctgcctggccaggcactgtgctcttacatgacagcccatgaaaccagtctatggcctgaccgttgtgttgctgtgcggtcacttttctaggtttttgtagaggaagaattcctggaattttttgaggactatcctccctactgaaataagtgtggctgtctgtcctgggatgggcttgtgttcatgcacagagagggtaagcactgacgtggaggctcatggtggcctctacgcatcctgtctttctcctttggtgaaagcaaatggaaacagctcaggaatcttactagggtcaggtgcggtggctcacaccttgtcatcccagcactttaggaggccgaggtggaaggatggcttgagcccaggttgagaccagcctgggcaacatagtgacacccccttgtctctacttaaaaaaaaaaaaattagctgggcgtgatggcgggtgcctgtagtcccatcttctcaggaggctgaggcaggagaatggtgtgaacccaggaagtggaatttgcagtgagtcgaggtctaaaaaaataataataataattcacaagtcacagtcatcacttcacatcagggacgtgttctgagaggtgtcctcaggcaatttcatggttgggtggggctaggttgctcttacacatcctagatggacagcctgccacacgcctgggccgtgtggtacatagcccagggctcctgagctgtggacctgtgcagcaggtgactgactgctccatcctgcaggcacttgtaacccagtggtatatgtgtctttaacatagaaaaggcacagcagaggccaggtgcggtggctcatgcctgtaatcccagcactttgggaggctgacgtgggcgaatcctgaggtcaggagttcgagaccagcctggccaacatggcgaaacccccgtctgtactaaaaatacaaaagattagctgggcgtagtggcgggcacct[137 bp omitted]tggtgaaaccccatctctactaaaaatacaaaaattagccgggtgtggtggcaggtggctgtaatcccagctactcaggaggccgaggcaggagaatcacttgaacctgggagtcagaagttgcagtgagccaagatcgcaccactgcactccagcctggatatatggcaagactctgtctcaagatttatatatattaaataaaaatacagttgtctgtaatcccaggactttgggaggc[134 bp omitted]gaagaacgagaatcgcttgaacccgggtggcggaggttgcagtgagctgagattgtgccactgcactccagcctcagtgacagagtgaaactcccgtctcaaaaataaaaaataaaggccaggcatggtggctcacacctgtaatcccagcactttgggaggctgaggcgggcggatcacgaggtcaggagatcaagaccatccggataacacgatgaaaccccgtctctactaaaaatacaaactgggcgtggtgtcaggcgcctgtagtcccagctactcaggaggctgaggcaggagaatggcgtgaatccgggaggcggagcttgcagtgagtcgagatcgcgccactgcactccagcctgggcaacagagcgagactccgtctcaaaaaaaaataaaaataaataaatacagttgtaatctgatggggccactatcaggtatgcggcctgtcactgactggaaattattctgcagttggcaatgatggctgtttttggagatctgaatccagttcatttgagggaacccccaaggttctctggttgtggcctcttgaataaacctctcacatttggacagtttgttaccaaattgggttctggatgttggtttccttccgtgttgggggtgggaggaaggtgtcacacctgtggagttccccccgctaccgcactggcaccagggtggctgctgcctgcagtgctgatggccgtgtaccctgtctgtccagattggtgctgaagacatggacggcttccaggcagacacggaggaggaggaagaggaggagggcgactgtatgatcgtggatgtcccggatgctgcgggtgagaagggctgtagatagcagaacgcactggtgaggtgggcgctggaggtaaacctcaacagagaagggatggggctgcctaagactagctccactgtgagcagccaggagggcttgcagctggaagtggctcctgccctgccacatcctcgggcgggctgggccgtgggtgctgaccatgccaggcatcgttctggccgcagagccacaagggcctatgctgggagtctcaggtggttgtgacgttagatgggggtcagggaaggctgcactgaggcagcaagggagggccaggtggatttctggagcactcgccaaagaggaagtacagaggccctgcagcaggctgcgtgggaggagtgtgcccgggtggtggggggcaggcagggtcaacctgagagcaggtgagcaggtcacctctagaagaggcacaacgccccagcctctgcctgtccccactgtcaggtggagggtcccgccctggggttgttgcaggccccatgaggcagcagggtggggtcttcccccagggagcccagagggcccagccagctcaagaccctccctctcttgccctgcagaggtccaagccccgtgtggagccgcttccggagctgggggtggtgtgggggtggacaccggcaaggccaccctgaccgcgagcccactgggtgcatcctgagagcaggggtgacgtatgtagaatgcttagggtgtcctccccacagagcagatacttgaaccgactcaattcctgtgtaaagagcactttgtcctgcttcacggacctccccaaagtgtgcagagttctatataggatgctggattagttcctttgatatttgtaaaaattcccccaagagccgcatatgaatctgccctttaataaagcattattgagattgctggcctattggggaagcctgcgggcacaggagcaggcgtggaatccaatacttgtaaatgaattgaagcgtcaggaccacccgcctggccacgtgcgcgggcccctggacctaacgaggcagtgtataaacttattctctagccctgagctgctctgtctgtcttttccgaaaacattgtgtttctctgagagtgcaccttgcccatggcccggccccatgtggtgcctggtgtctggggccagccttgtgccctgcaacagcaccgtcccatctgtttgtcactaagtcaccctcataccaggctgacctgggtcaaggtgcgggtttttccgcacgtgcttctgtccggcgatccctcctgccctgggttggggggttaggagagggtgttcccagagacctgctagggtcacctccctgaacccggagctgctgggagccgagtttggcttcgagtctgaggctttgtgagagcccaccccaggtcaggtgcatcttttgcgagtgctggagctagaaggtgacctcctccccgccccaggttgagtgggctttatccacactgtccgagggaggacaggcgacagccgctgtggtactgagcagctcagagcacacgcagccacggggagggtcacgctcgccagtcctgctcttcccagccacaccccacctgaagtcctaagcttcccttcagggaaccctatgtgggaaaagtgtcagctacctccatccacccagtcagggacggcagggcgcccgggccaggccttcctgctgggaagcaggattcagctgtgcctgaagcagaggctgcccctgtgccacacctttgatgagctttacaggggctcccgacaacccggaatcaggtcctggggcctgcaggacgcaggactggagtgacagcctccattctcaacaggccgggtgcccacaccagctggggcagtgccgggggcgagggagggaccaatgcaaggtcaggggcacgagcataggccccgggcacctcccccaggtgcagacctgcatccccaagtcagcagtggggccggggcacacatgccttccacactgcagggcagagtccctgtgtctcctggggctgctgtaccacaaacctggtggcttaaagcaagtcaccatctcacagcttgggggtcagagtgcacacatgccccgccaggctaacatcaagctgtgggcaggaccaggccctcctggagagtttcccagtgctcggaggcgctgcatccctcagctcggggtcccttcctccaccttcacagccatgcgcagcctcttccagtctctctctgattcaccctcctgccacctcttgtgaggacactgggtcccggaccacccaggatcatctcccagctcaagacctttcatcatacccaagcccctcttgccaggtgaagttgcgcatctgcaggttccaggaataggatgtggccgtctcaggacaccctgtccctctggccacagggaagccaggcctgtgacagcactcgcctcccctgcagggactgggcctttgtgggcacagcacagcctcccctagcgcacgggacttcctccccaggtgggtggctcatcgggcacttgtggccaggtgctggcctgagaacaggtatccacatggtcccaccttgacagggagccacacccagcccccaagccatccgctcttcagcaggtgggcctgccctgtgtcccacggtttcaacggagaaccaagaaactatattcaaacaacctgtttatttgggcttatgatttactaactgcaggtctatgtgcaggaaggccagcatcccctcctgccgttgtcacccacatccacagagcagccctagtgccaggtgcagccactgccacccacggcacacgggaacaggacccatgctgcaggcctgctctcctgcccagggagatgccacgtgtgtctgtccggcagcttcatgacacagttaccaagcagctagggagggcttagatttgttggtgtccccaggcctctccctcgggggcttgggcgcatccccacagcccccaagggatgggggctctgccacggggcccaattccacagctccacggctggcgcccctcccgtgcccatggggcagagccaagtatttccagaggtggcttggaggccctggggtggcggggagaggaacagggagagcatgagacagacccacagggctgaggccaaccctgcttttatttcacaagagcttctcgatggctgacaggagctcgggtttcaggatggagtccggctcggcccccgcggccttgatgtcctccagcacagccatgtcccacgagaaggtcaggagggcagagggcacctgcggtaggggtaggccgtcactctgagaccgagagtcggcccttgccgcggcagggaactcagcgggcaacctgggcgcggggatgccccggcctggaagccatctcagctggtggaggctgtggctcgcacccaggcctcctgccctctccctccgggactccaggacctaagcctaaacctactgcactagctaacgcacgtcaccgctcccatttgatggggaaactgaggcgtggagtagttatgaacttgctcgaggccctgctgccagtaagtgggaaagcaggattcaaacccagggacctgcccaggccccctgctctgagaacaaggaggctccctcctgggggtgtctgtgccggtcccaggagaacctgcagaggcatcgggtcagcggtgctcctgcgggccgacactcaccagcccgcactcgttcaaggccaggttctcgtcctcggacagcttctgccctcccgaggccagcagctcaaaaggcagccagtcgctctgcagggcctcccggacgaacccgtacaccgcccccagccgctcccgagcgtagaaagtgcctggggagtgggggagtcagagcgggtggggcccagggccccctaccaacccgagccgccctccacgggcatcgttggtgcccaccctgcaggaggcagccatcggggaggcgcacgcgcagcagcgtgtagttgtacttgcgcagcccccgctgctcctccttctcccgcatggccttggtccgcagcacgctcagccgctccaccgcctcggacctgcacacgcgggccaggtcacgagggctggccggggttcttccaccccgccccgccccactctgctccgcggacgtcaggcccacctgagcctctgctcccgcttgatctcctctgctgtgaggttgaagaagtccccaggcagttcgaactgcgaggccaggggcgagggctggaagacgcggcgctgcctgtccagcttggcgcgcacgggctccgcagccagcagctgttccttgtgcctctccaggctctggggctgggccaaggtggtctcgctcagcacgtagaactcctcggggtcctctacagcgtggcaggacatgggtgtcactgtgcaatggagagacccccaagccgggccctcctgccccgaggcccctcgtccccattccctactcagccaggccctgtccacttaccctgatcctgggcgggaagcaacaccttctggaacccaatggcctcaaaaaactcgtgggtcccttccaggcagttaatgcgctcctgggggtggagatgggcgtcactgggggcccctggcttcctccatggcctggccacaccccacccagtccaggggcccggctctcgctattgggagcagctgtcgacccctggatggggcccagccctgggggtgcctcagtgctggatgcaaacctgcttttctacggtgggggctgtggagtctccaacagctctgcacagaggaaagagtcacaaccaggcacgaagagtgaggctgaggagccagacactgctggggcctgatgcgaggctaacaccgcccaggaccccagtccctgccctttcccccagaagaaccagacatctggtttgcatgagaaacctccccagagtcgacatgttcccaaacaagcccagctgaagaggaggaaaaggatgcaggtgaggagaggcagaatttgttgatttggggtgaccggtgcataaaagtcttgctctccatcttgtcctgctaccttctactggccgaacccttcactgcttgtggctcaactctcgctagctcctccagggagcccaccgcctggtgtgggccaccaccggctcctgcaggccagctgcccccacccccagcctgggccccgggggccagaaggcacgcccacctgaaacaccttgttctgcagcttgatcttccggtacttctcctcctcggggtgcaggtggatgttgtccaggtacctggggtaggtggagaaggtgagtggggcacagcccaggctgcccacccggcccctctgtgcctcctgctccaggtaacagcagctcagccacacttggcctctagtcagagggaagaagcggcccagtgacgcgagggcagcagaccatctccgggtggaaggcacacctcggacaccccatggagcccacccctggtgccagcaggagccccacggaacccctcaccgtcccaccagccctggaagggcacaattaaccacagcggtggggaagccacagtgccggaagagtggagagccagagctgaagggccgcagtgccagcagggggctcctgcggggtgctccctcggcgttggcgggcagcgtggacctccaggcctgcccccgatcctgagacccggggagtggggtgggaccctgcctcctccacatgttccccaaggaagccagggtgggaaacccctgattccttcaacaccttcattttgcacacgggtaaactgaggcccaaggaggcccagccctttgcctgaggcctctgggtggagctgcctcactctcggcctatgctccttcccaacccacctcagcaggtaatgagggggccagagggggtgacagccccagtgggaggggtgctgggatgagctggaggggccaggcagggcaaaggggccacacgctcacttggcaatggtgtccacacccagcttcacccggtcctggtctttgttgaacgtgtagatcttcatgatggaggcggccactgggtcggtggagaagtgctgggaggagggaagcagggaaagccactcactgagagcccgggccgcacggccctccgctgcccaggtaacaggggcaggaaaaggaaggcagaacagcggcttggagcggccccagctgtgcgctcatcacagaaaggaaaagagagaccctccaagaccgcagccctgcccacgccccagggcagaggcgacgcagccaagacccagcagaactcaagtctccccttccgccttctcaaggctagatccatgggacttggaagccagtgtgacgcgacagaactgtgcctcacactctggctttagaactcgacctcagtgctgagatccatcaaggccaccgccacttacagaacctcccgccaccatggacgccccatccctcctgctctcgcagccccatgatggacgttctggaaccactcccgggcctcatgtttacaaagagaccgagaggcccatcgtccagggtcacagggatggcaggtggcagagaggacacaaatgagtctgcaaccctcaatgtctgaaactcaatagctggaagacggatacccccagcccctgcccctccccgaggtcccacctatccacctatgttaccgggggaggggagaagtcatagctggaactctgggggtttcccagaaccagccctgctgactgcgaacagcgtcccagcatggagaggctgagaacagtacgtaccctaagacctggaaaagattggggcacaaatccacgctcggcacagccatcacacacggccacacccagagagccacccatggcctgggaagcagggctgccacccgcacctccctgggctgcccagacgagggcgggtgaacagaagggcagcccagggccatgtgtcaggattcgggccacctgcccaggcagcccagagctccacccaccaccccccaccctcaactgcacagcagggtccctcagcagccccctgcgtcacacggaccaatgacctacacactgagccggggctcatgccaactgaaaattgggacccggcccagtctgccggtttagttgctgagatgatgtggggagcgggacagagcacgtggatgcagagaggcagagctgccagatgggcatgtccccaagacaacagcttccttgggatcagagcgcccgggacagcacaccagccaagggaagcgtgtcagctccaaaagcgggcctcgggcgttttgggcgactggctgccaggcttaggtcaggagctgggtacatgcacagacaagggacgaaggaacagcagccaggaaggggtccaaatccatacaggaatgtactttgtgagaaaggtgggatttcacagctgtaagcaaaagacaggtgctctcgacaggtggggctgagaagaaagctgagccaagatctaaaaaaaaaattacatcagctccatcccaccatgttacataataacatgctccagctggatcaaagcttcaaccatggaaacaagcaagcagtcaaggagaagccagaagaaaagctctggaggccgggcacggtggctcatgcctggaatcccagcactttgggaggccgaggcggtcggatcacgagattaggagagcgagaccatcccggccaacatggtgaaacctcatctctaaaatacaaaagttagcccgggtgtggtggcgtgcacctgtagtcccagctacttgggaggctgaggcaggtgaattgcttgaacccgggaagcaga[131 bp omitted]atttctaagaatgaccccaaacccaaaagccatgaactaaaactgacacatttaattatacagagatcaaaaaatcctacacagcaaagtgaccataagcagagccaacatagaagcaactagagggaaacatgtgcaactcatatcataggcaa[210 bp omitted]ggctgagg[170 bp omitted]tgtagaaaggacgcattctcatatgaaacatggccaatccaaaataaggaaagtgcaaattaactctatcctgagatgttattttcacctaccaacaggcgtaaagatcaaagtttggtgatttacagtatggtgagaggatggggacacgggtgcttttgcacacactgctggagtgggtgtgagtctggagagtctatggaactattactattttgttttgttttgtttttaagatgaagtttcgctcttgtcacccagtgtccacgctggagctcaatggcgtgatctgggctcactgcaacctccacctcccaggttcaagcgattctcctgcctcagtctcctgagtagctgggattacaggcgcctgtcaccacgcctggctaatttttgtatatttagtagatagggggtttcactatgttgaccaggctggtcttggaacttctgacctcaggtgatccacctgcctcagcctcccaaagcactggaattacaggcaagagccaccgcgcccagccacttactattttctgagaaagggtctcacttgtcacccaggctggtgtgcagtggcatgattacagctcactgcagcctctacctcccaggctgaagcaatcctcccacctcagccttctgagtagcagggactgcaggtgcacgccaccatgcccagctatttttttttgtttttggcagagacagggttttgccatgttgcccaggctaaagccgaagtttctgagaacctattgatggtgttaagtgaggacttgctgtattggaaaaaaatgctgtggacgtttttattttttgagatggagttttgctcttgttgcccaggttggagtgcaatggcgctatctcggctcaccacaacctctgcctcctggattcaagcaattctcttgcctcagcctcccgagtagctgggattacaggcatgtgccaccatgcctggctaattttgtaggaagttctttctgtattgaagcaaataatacttaaccttttatgaaaaacaaccaggccacgcgtggtggctcacgtctgtaatcctagcactttgggaggctgaggcgggttgatcacttgaggcaaaagttcgagaccagcctggccaacatggtgaaaccccatctctactaaaaatacaaaaattagccaggcatggtggcaggtgcctgtaatcccagctacttgagaggctgaggcacgagaatcgtttgaatccaggaggcggaggttgtagtgagccgagaatgcgccactgcactccagcctgggtgtcagagtgagactccatctcaaaaaaaaaaaaaaagacacctagttgggagagaggagatacagatgcatacacaatggtgtgcctggatttggggtatcagaggaggggcttcactactagcagtggcctctggggactctgggagggatctgtaccacctgggcttccgatggagggtggctcaggcacaggaagctacaggttggggcaggagcacacagggtgccactcaccaagagaatggcctccttgatgcaggcgtcccgctggtccttcctcagggtggccccagtgagcggacaggtgaagtacacgccaggcacagccaggtgggcagagccttcctctctgggctcagatacctggggcggtgaaagcgtccaagtctggaccgtggacagaggccaccccgaccctcgccgagcaccacagtcctgagtgtggcccgtagaaccagacatctccagcccccatgctgtcccttccacctggtggccgtgggagacaccctggccaagtgaccggatccccgagtcttttccctggtatgtcaaatgtccctgtggggcctgctcagaactaaacgaggtaaggaacggaaagtacggagcagcttctgacacgcaggaaacacccagcagatggcagctgggttcctgctggtcctgtccccaagctgttgaggaaggagctctgtgtgggtgtctgcgggcacagtgcgctggacaaggcatgacttctgggcctccatttctaggccatctctaaggtccctgcgtgctaaaattcactgaatcctcgagggtcaagctgcttagaactcctttcagcggagctctgaaggcccacctcctagaggaaggcctccctgattccacccgtctccacagagcctcttgacctccaaggcaggcaggactgggcagtgctaggggacaggctctgaaaccacagactggctctggtcctgcctttgctggtcctggggtgtaggagagaggacagctggtttcacctctctcaaccccggttctctttttgaatagtggaaactgtaactgcatctgcccttaaggggttaaggggagggagcgatgggctcgtgtacctgaggcccacttctccaggcctgagccggcatcctcagctgccgagccccgaaggtcccagacaacaccgtgttccaccacaacctgtgtccaccttgcaaggcaaggttttccaacagcccttgagccccaagggcagaggccacatctcccccgtgacacagtcaagctgtccccaccccttggcatgggacagtgccaccagtggctgttcttaccacgttggtccctggggcctcggggctcccgctgacggtggcttcggcttgaagttcctttctcactggaaggcagcccaagaaagagaggcagagacgggatagtgagcacgccgctgtcctggcccaagccccctcattcccggggtgggcctgggggccacgcacaccgccccagcctgcttctgctggaggtcaggctggaggtcccctgcaggacttgctgtgcagccacccctcagcctgagcaagcaccccactgcctgggcagcccgtttctgctccaagtctctgctcccaccccctccccaggaagctgcccttcccccagcacctgcccttgatgagccgctcccaagggtgaccctcacacccccacggttgctcatgtgacttctgcatccagggccaggcaccagggccgagaacctcaaacagccccaacctgggcccgaggagggccatatctcaccctggtttcggatggtgtcctgcgatgtggggccccaggcccgggactgcttctgctccagccgggctagggcggcagcggctgccatctgtgcctcattggtgggtccctggcggggcggcctgggggctggctggttgggcttctctttgtgggccttttccctgggaacagaccgagggagagtgagtgtatcctcccgaggtggccggcaaagctgacgtgcagtcacacagaggagcttctgcccctccccagcaccatcagccagacgtgtccctgcctatgtgggccaggacacctggttcccaggggccacctgcagccaccagatggttctactgcaggcggaagagcccctggaggaaggagatgctggttccactcagctctgcaccatcgggcaagtcctgcccccactggccctcagcgtcctcatctgtaaaatggggtgacagcacccctcctgaggtgaaggcaccttgacatcctcagtgctttttttctttttgagacagggtcttgctctctcaccaaggctggagtatagtggcacgatcatggcttactgcaatcctgagctcccaggctcaaggaatcctcccgcctcagcctcccaagtcgctgggacttagaggcaagcatcatcatgcctggctaatttttctatcgagacagggtctcgctatgtagctcaggctggtctcgaacttttgcctcaaatgatcctcccaccgtggcctcccaaactgctgggattataggcatgagccacagcacccagcccgcatcctcaggaattgaggagactcaaggggtgtcacatcctccctccctccctgccataagactctccaccctcaggtcacagcttcgtttgctgagcacctactgtgtgccaggaccctgctgggagctggtcggctcgcttggtttactcctcctaacaagctgccagggaggcctcaccatcccattcctaaacccaagagggacaggaagtccgggcgatgtgccccatgccacgccaccctcgtggcgggaccctggggagagcggacagcagaaccagcctcgccctggccactccatgccaggcctagggctgtgcaagtacgaagagctcatggactcgtggctccaccctgttgagccctacaccaaggagagttccgtaacccacgtggcacagtgacctggcagagaagcctcgcagagaagccctttctcccaacctgctcggacgcgtctgtctcacccgtctcctctcaggcccctcccatgaacttacgggctgtgtcaatttctgtgccgtaggtctattaaaaccttctgggaggccaggctctcagttcaagccctatactcctctggctctgcttacatacccgggcagccctccctcctcgtcccacccctgcctatctagtcctcccacagctgagcatcttgggtggaagaggagatgactcatgaagacccaccccggcctcatccgatatctgggtctttccaacaaaatgccatttcccagggcacctcaccccaaccagccatggaccctgcccccctgggcagccacagggacccttctggaacctcagccagggagcgtcagcatcactccactgcacaacgccctcccactgcaaaatcctaaagcttcccttggccagagagcccttcccagcctggcccactgccctcccgtggcctgtctcccctgggctccccgcagttcttcccacaccccagctgctccccactgcaggcccctgcactgtctgcaccttctgcccagaatgttctccgggggagtgggaggaggatgggggtctggaaagggctagagctgccgcagggagagaaggaggggcagatttccccacagctgagtctcactgtgtcctgggagaggccttcccaaaccacctgacggcccctgctcaccctccttggaggccctgggcactcatccaagcactcatcgcctgagcgctcatccaaggtctgttggtttatttgtccatcggctccctctagaaggtgagccctgggacagcagaggccttctcctgtccaccactgcagcctaaaacaggacttggtgcccacccaccccacacaccctggatatgcagtctcgctccacaagggacctccgcaccgcttcctttcccaaccttcccctccaaccttcccctctccgcccaggctctgggctgatccagccatcaccccgataccctgcatccttcctatcatgcccagtcccagtggccccagcaccccccacccactattggttgaatcaatgaagggctcccccgatttgcccccttctctccctgacccctctccctccctcactcagcctttgctctcctgctctcccccaggaaccctgacgtcctcactatgcccctacctccatcaccaccccactgccccgtgattcctgacccccacttcctgccacctccctgcctctcccagcccccactccctcacaatcccttccactattgcttacagacccgtgtcctggctgcctggctgacttcctcagtccctctccatcagtccccaccaccctctggccagccagctccctgcagcggccccagctctccagtttcccttttctcaacccaacagccctcagccttgcaccttccctagctccacttcttccccggccctcccagctggctcagccctgctcaggcccttctctccaagtcctccctagacaatccggaagcctgcccggcatctatctcctttcccctcctctcccacttccataatccacttggcacagtgacgtggcagagaagcctcgcagagaagctctttctcccagcctgctaagacgcgtctgtctcacccgtcttctcctctcaggcccctcccgggtaagagtccatctgtcagaatccctcacctccactctcctcacacaccttcctcagcccctccctctcaattcgccaggacatcccaggtcactgacgacgctgcccaccccggcctccctggccttccagactctttctagtctcccatcagcctcccacgtgctccagataccaaatccagaacccctcttcccatggatacctcaaaacaactcttcaccaccccaccccacagctgtgcgtcctcctccaagctcagctcccatccatggtcacctagattgccccaaatcatcccggcctcttcggccagccgggtccccagacagagctctccctcaccacccggctcaggactcatgatcccgtttttccccaaaggtcgttccactgacccccaactgcctacagccccgtcgccctaatcccccgccactgcatcggaccctcctgcggccccgcccccgagacctcccctcccgccccgccccctgcgctagttcccctcccctcgcctcccccgccgcgcccccgggtcatacccgccccctcctgccccgcccccagatctctctcccctccccctgacgcccaccctcggcccgacttcgtccgcccccggcgcctctccccctcccctgaccctcgcgtgccgctcccagcccctcatcctctccgatctcccgagccgcccaaggccccagatctctctccccggccgtccccgccccgcagggcctcaagcccctgcgttcctcacgcaccccacggactctttgagcttctgaccgggtcccgcgctcttgaacttgatgtcggccttgaactcctgaaagaatttcttcatggtggcggctggcccggcggcggggggccgcgggggcgggggggcacggggcccagtcggggacggggccgccggagaccagccaccggaagaaaattaaaaaaaaaaaaaaaaaaaaaaaaaaaatttacctcgccgccggaagtcccgccttcccctggcctgccacgtgacaatcgactagacgtgcctctctagcgctcggtgccttgctggcccagggcggccgctctgtacgctggagccgcgtctctgtggttcttccggactccgttgccagggcgacgagtgcacctctcgattggagacagggcattccgtggcgctccccaaacggtgacaaacggtgataggacagggacaggccaactgaacctcgcagagaaagcactgggccctatccctttcgctgctcaacctaaactaggcgcggtggctcacgcctgcaatcacagcactttggaggctcaagcggaaggattgcttgatcccagaagttggagaccagcctggcaacatggcaaaacctcgtctctataaaaaaaaaaaaaataaaataaaataaattagccgagggtggtggcgcgcgcctctcagctacttgggaggcagaggcgggaggatcgcttgaacccaagaggtcgaggctgcagtgagctgtgatcaagccactgcattccagcctgggcgacagagagagaccctgtctcaagcaaaacaaaaaaaattccaaccttctctgtctccccagagcttacgtgataaaatcccaattcaatgttgggtattggaggcccccacgatctggcctgttttggtgcctgaagcacccccccgccaccatcaccacgtaccctaggtaggagctgtttaagaggatgcacctgggccgggcgcggtggctcatgcctgtaatcccagcactttgggaggccgaagcgggcggatcacaaggtcaggagatcgagaccatcctggctaacacggtgataccccgtctctactaaaaatacaaaaaattagccgggcatggtggcaggcgtctgtactcacagctactcgggaggctgaggcag[136 bp omitted]ccaattgggacctggggattggggatccactttggtggacaccagttaatagtggcgtactttggtctgtgcaatccacaaagaagatacacaaagtgacagttaaaacaagcctcaaaaaatgggagttgggggtcagacgtggtggctcatgcctctaatcccagcactttgggaggccgaggccggcggatcacttgaggtcaggagtttgagaccagcctggccaacatggtgaaagcctgtctctatgggcaccggtaatcccagctactcgggaggctgaggcaggagaatcgcttgaacccggcaggtggaggttgcagtgagccgagatctcgccattgcacttcagcctgggcaacagagggagactctgcctcaaaaaagaaggagttggaatgagatacacagagactgatggaggagaagcctccaggtgaggaaacagcccaccccaagactgaaattgaaatatcatgggttggacgggtggctcaggcctgcagtcccaacattttgggaggccaaggtgggaggattgctttagcccaggaattggaggctgcagtaagctaggatcacgccactgcactccagcctgggcaacagagccagaccctgtcttattaaaaaaag[134 bp omitted]ttttaaaaaaattagccagccttggtggcgggcgcctgtagtcccagctacttgggaggctgaggcaggagaatggcgtgaacccaggaggcagagcttacagtgagccgagatcatgccactgtgctccagcctgggcaacagagcaagactccgtttcaaaaaaaaaaaaaaaaggaaaagaattgggccaggtgcggtggctcacacctgtaatcccagcactttgggaggtcaaggcgggtggatcacttaaggtcagaagttcaagaccgacctggccaacatagcaaaaccccgtctctattaaaaatacaaaaatcagccgggtgtggtggtgtgtgccagtaatcccagctacttgagaagctgaggcag[147 bp omitted]cccaaacttcaatctttctgatctccagtctcctatctatgaaatggggataagaataacactctctatagattgtaggggtgatcatgtgattagaaagttctcagtatgccgggcacggtggctcatgcctgtaatcccagctactcaggaggctaaggcaggagaatcacctgaacttgggaagcagaggttgcagtgagccgagactgcgccactgcaatccagcttggcaacagagcaagactccgtctcaaaaagaaaagaaaagaaaattacagctcattgttgtgaataaggaattgtataccctataactcaaataaaggtacaacactgggccaaagtcacacagctggaaagtggcagagacccatcccacttctccaagaataaaatcctatggggttcctcagcctggtctaaggagatcctaacattaataggccctaataaatttctatttcaggttctaagtattctgagggtttcagaaaccccgtttcttgttatcacccacctttccacctctgcctcagttacctggaagtatttccagctcacctctgggcctttgcctaggcattctcctttaccagaagggacttctcttcctctgcctaactcaatcctcttccaccatgacgctctcctggactatcttcctcatgtcggatgaggttatgagattaaataatttaacatttctgccaggagcggtcggtggctcacaccagtaattccagcactttgggaggacaacatttatttttcttttcttttcttttcttttttttttttttgagatggagtctcgctctgttgcccaggctgcagtgcagtggcacaatcttggctcactgcaagctccacctcccaggttcacaccattctcctgcctc[212 bp omitted]tcttccccacgctggagtgcagtggcacaatcatggctcactgcagcctagaacttctgagctcaagcagtcctccccactcagcttcccaagaagctgggactgcaggcatgtgccaccacactcagctaattttttttttttttttttttttgagaaggaatttcgctcttgttgcccaggctgtagtgcaatggtgcgatctcggctcaccacaacctccatctctcggattctcctgcctcagcctcccgagtagttgagattacaggcacccgccaccatgcctggctacttttttgtatttttagtagacacagggtttctccatg[136 bp omitted]ggctcacgcctgtaatcccagaacactggggggccgagggaggaggattgcttgagccctgatgttcaagaccaggatgggtaacatagtgagaccttgtttctactaaaaaataaaaataacaggccaggcacagtggctcacccctataatcccagtactttgggagtctgaggtgggtggatcacaaggtcaggagttcaagaccagcctggccaacatgatgaaaccttgtctctgctaaaaataaaatacaaaaattagctaggggtggtggcagcacctgtaatcccagctactcaggaggctgaggcagagaatcgcttgaacccgggaggcagaggtcacagtgagccaagatcatgccactgcactccagcctgggcaacagagcaagcctccatctcaaaaaataataataataataaataaaataaaaataacaccctgggcaacatggcgaacccttgtctctaccaaaaaaaaaaaaaaaaaaaatcagtgctggttgtgcctccctgtaatcccagctacttgggaggctgaggcatgagaattgcttgaacctgggaggcagaggttgcagtgagctgagatcatgccactgcattctggtttgtgagactctgtctcaaaaaacaaacaaaccaaaaattagtgaggcatggtggtgcgcacctgcagcttcagctgcttgggaggctgaggcaggaggagatcgagaccatcctggctaacatggtgtaaccccgtctctactaaaaatacaaaaaattagccaggtgtggtggtgggtgcctgtagtcccagctacttgggaggctgaggcaggagaatagcgtgaacctgggaggtggcgcttgcagtgagctgagatcgcgccactgcactccagcttgggcgacagagcaagactccgtctcaaaacaaaaaacaaaaaacaaacaaacaaacaaaaaaccattaaaagataaactcggccgggcgtggtggctcacacctgtaatcccagcactttgggaggccaaggtgggcggatcacgaggtcaggagattgagaccatcctggctaacatggtgaaaccccatctctactaaaaatacaaaaaattagccgggcgtggtggtgggcgcctgtagtcccagctactcgggaggctgaggcaggagaatggcgtgaacccgtgaggcagagc[131 bp omitted]gtattatactgatggggtctcgctaggttgcccaggctggtatagatctcctggtctcaagtgatccccctcaacctcccaaatcaccaggattagtggtgttaaccacctcgcccagcgtttgattgtaaagctgttggaactttaaattattcttcttattattatttttgagacggagtttttgctcttgtcacccaggctggagtgcaatggtgtgatctcagctcattgcaacctctgcctcctgggttcaagcgattcccctgcctcagcctcctcagtagctgggattacaggcacacgccaccacgcccggctaatttttgtatttttagtagagacaaggtctcaccatgttggccaggctggtcttgaactcctgacctcgtgatccacccaccttggtctcccaaagtgctgggattacaggtgtgagccaccgtgcctggcccaaaaattttttatacagatgtggtcttcctatgttgcccatgctggagcacaactacagtggccattcacaggcacaatcatgggtcactgcagcccagaactcccaggctcaagtgatcctcccacctcagcctcccaagtagccgggactacaggcatgagtcactgcacctagcttaaccattgcaacctccgcctcctgggtttaagtgattctcttgcctcagcctcccgagtagctaggattacagccaccacgcccagctaatatttgcatttttagcagagacagggttttaccatcttggccaggctggtctagaactcctgacctcctgatccacctgccttggcctcccaaagtgctgggattgcaggtgtgagccaccgcgccccgcaattttttttttttttttttttttttagaaagagtcttgctctgtcacccaggctggagtgtagtggtgcaatctcagctcactgcatgctctacctcccgggttcacgccattctcctgcctcagcctcccgagtagctgggactacagatgtccaccaccacgtccggctaattttttttgtatttttagtagagatggggtt[132 bp omitted]ggcctcaagtacattcgcattgttgtgcaaccattacagcaatcgttacatttcatctagtgaaacgtaaattctgcctaattaagtaataactacccccaaccctgataacctctagtctacttttcgtctctatgaatttgacaaccctagggacctcttatgagtggatacatataagacagtacttgtctttttacgtctggctgatttcactgaggatatcgtcttaaggttgcagcctgtgtaacaaatagtttttaaacgatactgcaggccgggcacggtggttcatgcctgtaatcccagcaatttgggaggccgaggctggtggatcacttgaggccagcaattcgagaccaggctggccaagatgatgaaaccccgactctaccaaaaatacaaaaatttgccaggtgtggtggcacgtgcctgtaatcccagctactcgggaggctgaggcaggagaaacccttgaacccaggaggttgagattgcagtgagccaagattgtgtcacagcactccagcctgggtgacagagactccgtctcaaaaaaaaaaaaaaaggaaaaaaaagatattgcaccagccttggcaacatggtgaaatcccatctctacaaaaaaaaaaaaaaaaaaaaattagcctgccatagtggcacacacctttagtcccagccacttgggggactgaggcaggaagattccttgagctcaggaggtcaagcctgtagtgagccaagattacaccactgcactccagtctgggtgacatagtgagactgtttctcaaaaaaaaaaaaaaaaaaaaaaaaaaattgcatggggccgggcaaggtggttcatacctgtaatcccagcactttgagaggtcgaggcaggagggctgcctgagctcaggagtttgagaccagtctgggtaacaaagtgggatcccatctttataagaaattaaaaattaaccaggtgtgctggcacatatctgtagtccaagctactcaggaggctgaggcagggggatcacttgagcccgaagtgtagaggctgtagtgagctgagatcatgtcactgcactccagcctggtcaggacagcaagatcctatctcaaaaaaaaaaaaattcttggccaggcgcggtggctcacgcctgtaatccagcactttgggaggccgaggcaggtggatcatgaggtcaggagattgagaccatccagagaggccaacagggtgaaaccccatctctactaaaacacaaaaaattagctgtgcttggtggcgcacactgtagtcccacctactcgggaggctgaagcacgggaatcgcttgaacccaggagtggaggttgcaatgagccaaaatcgcgccactgcactccagcctggtaacagagcaagactctgtctcaaaaaaataaataagctgggtgtggtggctcacgcctgtaatcccagcacgttgggaggccgaggtgggcagatcacgaggtcaggagttcgagaccatcctggcgaacacggtgaaaccccgactctactaaaaatacaaaaaaaaaaaaaaattagccaggcgtggtgcctgtagtcccagctacttgggaggctgaggcaggagaatggtgtgaacctgggaggcggagcttgcagtgagctgagattgcgccactgcactccagcctcggcgacagtacgagactctgtctcaaaataaataaataaataaataaataaataaaatgcatgggagatatttatactaagaaatcattcagccagatgttgtggctcatgcctgtaatcccagtaatttgggagactgaaatgtgaggatctcttgaactctgatgttctagatcaccttgggtgacataagtgagacgctgtctctaaaacaaacaaaatcatgtgatgtgtatctgctcttcagatgtaacttgacatcctgaattttaactggaaattctaactatagcccttctcaatgtagcaggctaaaggatctttttaaaaaaaaaaatggctttggccaggtgcagtggctcacatctgtaatcccagcactttgggaggccaaggcgggcagatcagaaggtcaggagatcgagaccatcttggctaacacggtaaaaccccgtctctactaaaaaatagaaaaaattagccgggcgtggtggcgggcgcctttagtcccagctagttgggaggctaagacgggagaatagcgtgaacatgggaggcggagcttgcagtgcgccgagatgtgccactgcactccagcctgggcaacagagtgagactgtttcaaaaaaaaaaaaaaaaggctttatttattttttgagatggagtctcactctgtagcccaggctggagtgcagtggcacgatctcggctcactgcaacttccgcctcccaggttcaagtgattctcccgcctcagcctcctgagtagctgggattacagcgtgcgccaccacgcccagctaatttttttgtatttttagtagagatagggtttcaccatgttggtcaggctgatcttgaactcctgacctcgtgatctgctggccttggcctcccaaagtattgggattataggtgtgagccaccatgccccgtctgtttatatatatatatatacacacacatatataatatatacacacatatattatatatatatattatatatacacatatataatatatacacacatatatatacatatatattatacatacacatatatattatatatacatatattatatatatacatgttatatatacatttatattatatatacatatatattatatatatacatatatacatatatgtatattatatatacacatatattatatatgtgtgtatatatacacatatattatatatacacacatatgtaatatctaatatataaacacacatatataatatattatatattatatatttaatatatgtattatatataatatataatatatacaatatataaatatatattaatatataatatataaatatatataacataataatatataaatatttaatatatatttatataaaaatatatattatataatatataatatatattatataaaaatattatatataatatatattatatatatatttatctacatacaatatatatatatattttttgagacagagtctctctgttgcccagtctggagtgcagtggcaccatctcggctcactgcaacctcagcctcctgggttcaagcaattttcctgcctc[134 bp omitted]gcctcccaaagtgctgagattacaggcgtgatttatttttaatacggacagtcttgctatgttggccagggtggtctcaaactcctggcctcaaacaatcctcccgcctcaagtgctaggattacaggtgtcagctaccgtggtcacccagctttactgatatataacttacataccatcaatttcacctctttcagtatataattcaatgaagtttatcatgtatttacagaattgtacaaccatcatcacaatctaaatttagaaagcttgcatcatcctaaaaagacacctcaggctgggcttggtggctcacaccagtggatcacgcttgtggctcactttgggaggccgaggcaggcagatcacctgaggtcaggagttcaagaccagcctgcccaaaatggtggcacacaccaccactccaggctaattttttgtatttttagtagagacagggttttaccatgttggccagactagcctcaagctcctaacctcaggtgatctgcctgccttggcctccaaaaatgctgggattacaggcgtcagtgactgcgcctggtcagccttcttaaaggccatatctccaatatggttccatgggaggtctgtgcttccacatacacatttgagaggacggtacaaaattcagtccctagcaggtaggaatggaattgctgggtcatatggtaagtctatgtattttctttttgttcttgttttcagacagagtcttgctctattgcccagactggagtgtattagcacaatctcggctcactgcaacctctccctcttgggttcaagcaatcctcctgcctcagcttcccgagtagttgggattgcaggaatgtgccatcacacctggccaatttttttggtat[161 bp omitted]tctcctgcctcagcctcccaagtagctgggactgcaggtgcccgccaccacgcccggctaattttttgtatttttagtagagatggggtttcactgtgttagccaggatgatctcgatctcctgacatcgtgatccacctgcctcggcctcccaaagtgctgggattacacgcataagccgcggcacctggcctatgtttaatttttattttatttatttatttttttgagacgaagtctaactctgttgcccaagctgcagtgcagtggcgcaatctcggctcactgcaaccgccccctccgggttcaagcgattctccctgcctcagtctcctgagtagctgggactacaggcacacaccatcatgcccagctaatttttgtttttcagtagacatggggtttcacta[139 bp omitted]atggagtgcagtggtgcaatctcagctcactgcaaccattgcctccctgggctcgatcctcattcctcagcctcctgagtagctcagagtagaagtgtgcggatcatgcccaactgatttttatattttttgtagagatggggtttaaccatgttgctcaggctggtctcgaactcctgggctcaagcgaattttccacctcagtcgtgctgggattactggtgtgagatgccatgccaggccttacgtttcagttttaaagaaatggtctttgttgatccatatttcacatgcatagggatgttttttgagaataaaatactctctttgtatcctctgatcagatccccccaatagtttcccaagaagttaaaataaaacccaaacttctcatttatgtttgtaatgtattgtgataggtcctctacggacccctccagccctccagctttatctgtttcccctactcacacacagtcatcctaggatcagatgggttttttgttgttgctgttgttgttcttgtttttgcttgtttgctttttcttttcttttctttttttttttgaatcaaagtctcgctctgtcacccaggctggagtgcagtggcatgatcttggctcactgcaacctccgcttcccgggttcaagtgattctcgtgcctcagcctcccgagtagctggaattacaggcgcctgccaccacgcctggctaattttttgtatttttagtagagatgcggtttcaccatgttggccagggtggtctcaaactcctgacttcaagtgatctacccgcctcggcctctcaaagtgttgggattacaggcgtgagccaccgcgcccggtctcgtttgttttttgcaacggagtctcgctctgtcacccaggttgtagtgtaacggcgtgatctcggctcactgcaccctccgcctcccaggttcaagtgattatcctgcctcagcctcccaagtagctaggagtataggcgcccaccaccacgcccggctaatttttgtattttttctagagatgggatttcaccatgttggccaggctggtctcgtactcctgaccttaagtgaggatcagacgcttgtttttgctcttccctctgctcctcatgccctcccagggctcgcctcactatcatgtccaacttctattcattctcccagtgtctggttaaactcacttcatccagtaaccctctgtgatcccccaggagagaagaagtcgtctccattattcagctttttttcctcaagcaccctggttcattttagttcttaccatggatcctaattacaaaaaacaaaacaaaacacagcaacatcaacaaattttaaaacttaacatttcttggccctgttatacttgattcctggaaggtagagttttgttttttgtttttgttttttttttgagacagagtctcgcgctgtcgcccaggctggagtgcagtggcacgatctcggctcactgcaagctccgcctcccggggtcaggccattctcctgcctcagcctccctagtagctgggactacaggcgcctgccacc[185 bp omitted]ccagtctggagtgcagtggcgcgatctcggcttactgcaaccccccgctcctgggttcgagtgattctcctgc[134 bp omitted]gtcctctcaaagtgccggggttacagccgtgagccatcgcgtccggccgagttatagcttctaatacttcctgtatttcctgttgccgggctcagtctagagcagggtcctcacaatcattatgggccccatcttccaagtgcagagagcgaagcccaggacaatcaagtgactcggccccacggtattcagtacatttttcttgaatgaatgaataggtctgtgtggcgttttggggccctggcatatagtaggtactcagttaagtttttaactaagtgaagaaataactattttgtgcattttgtggctgtttatactaagagctcccccggagcctgccccttcctctaagtcccgcctcctcgagctggcaatcgcccgtccctgttttatgttgtatcgctcttctttcgatagccaatggccgacgttcccgctgaagccccgcctcttgtgatggccaatgcctgctccctaccttgaggcgcttctcttgtggtatccaatggcttgcatatctactttaagcctctcctcctgagcgggagaggctgtcaatgacccgcccattgcgttaagtgattggccttcttttctgcggtatccaatgttctgccctccttatatccccttctcttgtggaggtctatgtcctgcctctttcccttaagctccaccccttcactcccttagagcgtctgttcgtctcctcccacctttccctttcacctcccataacctcccattagagtctctgggttacgccccttgggtctgtccgttatccaatcccgttaactgctgtgctccaacctctgttcttattggtcgcctcccttctctgtcccctgcacgtggtcctgatcgacggctttgccggcccgtgacggccggagggctgaacttccgttggcgcaacgcccaataagcgcgcgtcggcaggctgcccagacagcctcccccgccccctcggcgtcccgctcccgcccccggcttcgcctcccgctgccgccgccgccgccgccgcagccgctaccgccgctgcagccgctttccgcggcctgggcctctcgccgtcagcatgccacacgccttcaagcccggggacttggtgttcgctaagatgaagggctaccctcactggcctgccagggtgaggccgcgcgggagatggggccggtgggggggggggggggggcagcgggggccccgggccggaggcgggcactggagggccggggttgtcctgggcctgaaggagctgcgccccgggggtctggggttcatggggtctgggggtgtccgagacccgcagcggccccgccctgggggtctgggggtcctgggccgcagggagctgcgccctaggggtctggggttgtccggggcctgccggagccgcgccccggggtctagggatcctgggcctcagggagccccgccctcggggcctgggggtcctgggctgcagggagccgcgttcttgtggtctggtggtgttcggatcctgcaggacccgccgtctgggcctgcaggagcccctcccggggtctgggggtcctcggcctcagggagctgcgtcctggggttctgggggtgtccaagccctgcaggagccgcgccccggggtctgggggccctgggcctcagggggccgcgcctaggggttctgagggtgtctgcggcctgagagactctcgcccttggtgtatgagggttttggggctcagagagtcgctccctgggagtctgggggtatcctgggcccgagggagtcgcaccttgggggtttgggggtgtttggggcctgaaagagccgcgcgccgacggtctgggggtcccgggcccgaggaagcggtgccctgggggtctggggcctgataaattctcactctgggggaatggcggtcctggacctgagggagctgcgccgtggggatctggggggtgtccagggcctgaaggagctgcggcgccaatggtctgggggtcctgggcctgaggaagctgcgctctgggggtctggggcttctgtgcctgagggagctgcaccatggggatctggggttgccctggcccagagggagccacgcctcgtgtgtctgggggtgtccagggtgcctcagggagccgtgcgcagggtgtctgggagggtctgggacctgagggaccctcacctgagggcctggggatcccaggcctgagggctcaaggttcaagtttgagcagaactgcggaacttgagatttggggtcagatatgggggctgaagcactcccttgtgggtcctggagaagcccagttttgaggggctggggggccgagggccatgtgctaggggtccagggttggaggaggcagtcaggggggaaggttgagggtcaaggctaagggaagctgggacctctgagtgaggggctgggggtgggggaatggggctcggggctctgttcacggggtcactgggactcggggaactggaccttagaatgaagttggcatcgggactgttgggggaccctggggattggtcccctgtggggaggaggatgtagaagctggttttggagggacttgagggtggggtggtccaaccccaatgcttgaaatggagacaggcccgggcccagggagtgggagcgcttctgagggaagggggctggccgaggggaccttggatgcccctttggtggaagctggggtcccgacgacctggatagtcccaggtgtcctggcctgaaggatattccgcaccttggagtcccaggtgtggagggggtgagttccaggccctgagaggtacaggccagcgggaagcagggaccccaggctattgtcatccccaggtcttagggctgagtctcccagggctgaggttggtggaatttgccgggcaggactgaggaatttggcactgggggtggaaggctggggcagcagggaggggctgtggagggggacaccaaacggtgctctggaccagaaccagcccaggtccgaagctggcaatgccgctgggatgggtgggcctcggaggaccgtgggcgggtcttgggagaagcggggctgtgaggcatgccgggctggtcctcgggtggactgaatttaggatgcttctggcgggagagggatgctgggcctggcggcccatggccgagcccaggggccagggactctgataaagtagctctgaggagacccaagcgagaaggaagctgggtgagtggggcagggaagatcgggagccccctagaagctggagacgtggatggggaaggaatgcattgggaggggagaagccactccagcctgctgtgctcgcgctgactttcttgggggagaccagagcaatgcaactttataggcacttccctccctttcccagctctcttcttcccagagcactcgcttttctctcccccgtccccccttctccagcctgctctcctagccccaaacgtttccaagcacctgattggaagtgaaggggctgttagtctcctgtggggaggtgactgacagctgccggagcccatgggcctgcagggagagggtgggacttcctggatgctcagggccgtttcttgtagcccaccccccaccctctgcatccttggagctgccagctgcatcctctgggggaccgcccgtgagcccctctttgcgggaggggtccccaggaaaggtcctgggagtccatagacgctgagcttggccccaccccctggttgcttcagagggccggatctggctttgctcaggtggagcacctgccctggggccagctccgtccctggggtagggggagagctctctgggtggggcacagctttgcagtgaagggtacacagaagaatgcagcttcccatcgggaaggggctgctgcttcctgggttgaaggctcccctcctcccagcgtgatttgccccaagtaacttggctgatttctcggtgatttcctgggtcagtgggtaaagccaccccctcactggcctctcactgcagatcgacgacatcgcggatggcgccgtgaagcccccacccaacaagtaccccatctttttctttggcacacacgaaacgtaagtgtccccttctggggcttggttttctcctctggtgcctcccggggtggcctcactcacctgggactggcccccgtttcccttctccagagccttcctgggacccaaggacctgttcccctacgacaaatgtaaagacaagtacgggaagcccaacaagaggaaaggcttcaatgaagggctgtgggagatccagaacaacccccacgccagctacagcgcccctccggtgagtacccggggtggagagccagtgtgaagcgcgctactgatgcaagaaggggcctccagttagggtctctcccctgggcactgtggacacatggggctcgatcgttccctgtggtggggcattctgggccctgcaggtgctgagcagtgtccctggcctccacctactcagtgccaaggccacccccaccccattcatggtgatgacagatgtccccagtcattgcccagtgtcccctgggtggaggggaacggg[136 bp omitted]ctcctgtattcccgccattctcctgcctcagcctcctgagtagctgggactacaggtgcccgccaccacacccggctaatttttttgtatttttaatagagacagggtttcactgtgttagccaggatggtctcaatctcctgacttcgtgatccacccgcc[134 bp omitted]acctctgcctccgggtccaactgactctgctgcctcagacgcccgagttgctgggattacaggtgcccaccaccacacccagctaatttttgtatttttggtagagacagggtttcaccatgttggccaggctggtctcgaactcctgaactcagatgatccacccgcctcggcctcccaaagtgttggggttgcaggggtgagccactgcgcttggccagcccgaatttctaacagagtgttatcatagctctcataaaaccttttattttcttaggaaaagacgtttttttcttttgagaagagccccctctttcactgttactgccagattttagaggagtgaaaagtctgtagtgtgtagatgtgagcgttctcagtcaggtggaaaaaaacaccaagaatcagatgacatctcattggcaaatgagtgtctggaaatagtcagggaaaggaaggaatttagaaaagcggaaggcaaatggctaaaaggcagtggaaggatgggagaaaggtgccttactctgagtattctggggtgaggtggggagtgggggaactgggctggggttctttcctctgctttaaccacactgcttttgaggtttctgtgacaggctgggggccggggttagtagcccaggcttagctgggggggcatgaatttggcggggaggcccagggaactgaccacaagctagggaaaacttggccattaaggaagaaaagcacatccgaggtggtctgagtggagcaaggcaggaggggcccagcctttggcttttgcgagtggaggatgcagtctctttgtggttcctggtcctgtttgagaacctggggtcttgaggtggcctgtctgtgcctctcctttgtttcggcctgggctgggtggtgcttgtgagcatttgctccaggatccgcagacgtttcggtggtgacacctgccacgcacacgtgccgcactggggaccaggaacagggatgagtcaggcacagtccttgccttctgggagctcatggtccagaattgaggattcactcaacggatgtcccttgagcgccgaggatctggcagccccttctcagggggccggggcccaccgatgttgcatgctgagggtattttactttaacacccatggtgtgtctaggagactgaggtttccctggtttcatacttgctatctttcctcacgctgtgcctgtccccagcctggaaggataggtcagaaatccttcaaggtagctgtttcaggagatctttttctggccccaggtcaagttctctttggttccgtcctgagctcattacctcctggtgaatcatcacaccatttaatatttattggacacctacagcttgctaagcattatatagaggcctgtctttgaggaaaggaaattaaacaagccctgtacagatcccccaagatgagaagtagctttagttgaggccactgctgctcttagcttctctggcccatctatgcttctagatggaacgtgtgtttaagatgcagattcctggctgggcactgtggctcacacctgtaatcccagcactttgggaggctgtggctggtggatcacgaagtcaggagttcaagaccagcttggccaagatggtgaaacccagtatctactaaaaatacaaaaattagctgggcgtggtggcaggcgcctataatcccagctactcgggaggctgaggcaggagaattgcttcaacgcgggagggagaa[132 bp omitted]gatgggagccctgaagtttttcttgccaa[136 bp omitted]ctgcctcagcctcccgagtagctgggactatgggcgcccactaccatgcctggctaattttgtatttttagtagagacgatgtttcaccatgttggtcaggctggtcttgaactcctgacctcaggtaatccgcccaccttggcctccaaagtgctgggattacaggtgtgagccaccacacccagcccaggctcattcttttaacagccttagcgcaactactaatgccaccaagagcggacaggaaggcctgggtcccatccccttgcgaagccagtaggtgaaacatggcagcttggcctggttccacttgcatcgccttttggtcctcacagtaatcctcagagtggcccaggtgggtagttggttggttggtttttttttttcagacggtgtctcactctctcgcccaggctggagtgcagtggtgcgacctcggctcactgcaacctctgtctcctgggtttaagtgattcttcttctgcctcagcctcccaagtagctgggactacaggcatgtgccaccacgcccggctaattttttgtatttttagtagagacgggtttcacca[139 bp omitted]ctcaaggggttgctcagatgggccaggcatggtggctcacgcctgtaacctcagcactgtgggaggccaagggggcagatcacttcaggtcaggagttccagaccagcctgttcaacatggcgaaaccccattctaccaaaactacaaagattagccgggctcacgcctgaaatcccagcactttgggagactgaggaggggtcacctgaggtcaggatgtcaagatcagactggccaacagaatga[136 bp omitted]cctgtctctactaaaaaaaaaatacagaaagttagccgggcgtggcacctgtagtcccagctactctggaggctgaagcaggagaatggcatgaacccgggaggcggagcttgcagtgagctgagctcccaccactgcactccagcctgggcgacacagcgagattccatctaaaaaaaaaaaaaaagaaagaaagaaaccccgcctctacccaaactacaaaaattagccacgcttacacctgtaatcccagcactttgggaggccaagagggtgggtcacctgaggtcaggaggtcagaccagcctggccaacacagtgaaaccctgcctctacaaaaatataaaaattacccagatgtggtggtgggcacctgtaatcccagctactctacaggctgaggccggggaatctcttgaacccgggaggcggaagttgcagtgagctgagatgctgccactgcactccagcctgggcgacagaatgagactctgtctaaaaaaaaaaaaaaaaaaaaatttgcttagatgcccagagggacccagctggtgtctgaagccttgtagacccaggccacggtttctcagcatcagtaccttataagagagtatagcagtgacagttggggccaggtcattctctggcatagggtctgtcctgggcattgcagggtgttgagcagcatctctggcctctgctcactccatgcaaggagcgcccactggtaatcttgatgaccaaaatgtctctagacatttgacctagaaggatcccacctaatacatccttgttgcttggtagatgaagaggtagagagacctgtccagggttctcaagcttgtgagcaacagagctgagctggggtcagaaaccagggcccccagcttgcaggtcccccaactcccagatcccctgactccctggccccccagctcccaggctggcattcttttccttctggctggtacaagccaggggcaggccctggaggatgggagtc[132 bp omitted]gaaaccccatctctactaaaaatgcaaaaattagctgggcatggcggtgggtgcctgtgatcccagctactcgggaggctgaggcaggacaatcacttgaacttgggaggtggaggttgcagtgggctgagattgtgccattgtactccagcctgggggatagagtgagactccgtctcaaaaaaaaagtgggagctggggccaagagcctgttgtatgagcgggtggacctgggagccaggcctggctctgccctgtgctcactgtgaatcttgaccattgacatcccctctgtgagcctcagtttccttattttttattattttttatttttttagactgagtctcactctgttgcccaggctggagtgcagtggcatgatcttggctcactgcaacctccacctcccgggttcaagctattctcctgctttggcctccctagtaggtgggattacgggcatccaccaccaaacccggctaatttttttttttttttgagacaagagtctcactctgtcgcccaggctggagtgcagtggtgcggtctctgctcactacaagctccgcctcctgggttcacgctattctcctgcctcagcctcccgagtagctgggactacaggcgtccc[137 bp omitted]gcctcccgagtagctgggactacaggcgcccgccaccactcctggctaattttttatatttttagtagagacggggtttcaccatgttagccaggatggtctcgatctcccgacctcgtgatccgcccgcctcgg[135 bp omitted]gcatcccaaagtgctgggattacaggcttgagccaccgcgcccggccaatttttgtattttttagtagagatttcactatgttggccaggctggtctcgaactcttgacctcaggcagtcctccttccttggcctcccaaagtgctgggattacaggcatgagccaccgtgcccggccctcagtttcctcatctaaaacagaggatttggtagtgctgacccctcagcgggctcctgggagagtccggtgagaaattgcacatcgacacttaggaagcgctcactggatggtggaggggatatttgggaacagagaggcaaagctggatttgaccttcccttttccaatttagtcacaccccctgccctgatcctccaagacagctacagaaatgagctgttcccctcactctcagccggggggactggaagttggctggctttggccttttttttttttttttttttttttgagatggagtctcgctctgttgccgaggctggagtgcagtggcgcgatctcggttcactgcaagctccacctcccaggttcgcgccattctcctgcctcagcctcccacagtgctggaattacaagtgtggcttactgcgccctggccttgttttttctttctttctttttttttttgagatggagtctcgctctgttgcccaggctggagtgcagtggcatcatctcggctcactgcaagctccacctcccaagttcaagtgattctcctgtctcagcctcccaagtagccgggactacaggcgcacatcaccacacccagctaatttttgtatttttagtagagatggggtttcaccatattggccaggctgatctcgaactcctgaccttatgatccacccctatcggcctccccaagtgctgggattataggcgtgagccaccgtgcccagccattatttttttcatagagacaggcaacactttgttgcctaggctggtcttgaattcctgggctcaagtgatcctccttccttggcctcccaatttgccgggattacaggagtaaaccacgggccctgctaaaggaaagatttttaatgaggagtggctatgacccaggcttcgaggccaagacctgctcgtgctttcatctcagatctgcagttactcgctgtgtgatcctgagctgttacttgacctctccctgccttttttcctcatctgcagaatcaggctggtcatgcccaccggttacatggggcattgataagtcctataactgccggtggctcctgggttcgtggcactcaccagctcctcctgtggaagatcctggggcatcagggttgggtcaggggcggggctgggtggagggagcgaccaggaaggagcccggggctcctcattctctgagctgctactccccacccccagcgcttgtctccttaccagggatgctccaaagagaaaccccaggtacgcgagcccttccccaaaggctctgtggagaggcgtgatcgagattggccgcgagagcgttattactctcagcgttctccgtttgcggcctgacctacttagtattaccctttttaatcttgtcaaaaattacacagacagggccctgtcgcttgggccacgaagacacaagggagacaaaacgtgctcgggccgagcggtgacgcttcaccacacccggttctcgttttccttgtgtgctgattgggggccgctagcctgcggctgtgcgcacggaggctggtgtgcgcctgctgtgggctcccagcctctcctcccggcgcgggaggaccaggctaagcctggagggagccgggaaactgaggaagggccgaggttccctcctgtggttccctcctcctggccccccctcttgaccagcgctgacgccctcattcctcaggccatgcttccattctgtccgggcatttctactcagacgctggcctcgcctgcagcatccgcccagccctgcaccgtgtactccctgctccctcttgcccggccgcaacacccggtcacaaacgtgggccttactctgcctgtccttcctggcctcgtctcccgcgagccccgtgacatgcctctcacccattctcacacccttatctcctccaccttgctctctcctggacaccatgcgtgccccactccagcctgtcacacgccattttggtcatcacaccaggagaatgggacttaattgtttcatgattttttttttttttttttttttgagacagtcttgctctgtctcctaagctggagtgcagtgacgctatctgggctcactgcaacctctgcctctcgtgttcaagcgattctcctgcctcagcctcctgagtagctgggactacaggcacctgccaccacgcccagctaattctttgtatttttagtagagatggagtttcattgtgttagccaggatggtcttgatctcctgacctcgtgatctgcctgccttggcctcccaaagtgttgggattacaggcgtgagccactgcacccggcctttttttttttttttttttgagacagtgtctgtcacccaggctggagtgcagtggtgtgatttcagctcactgcaatctctgcctcccaggttcaagtgattctcgtgcctcagcctcctcagtagctgggactacaggcgcctgccaccaggcccggctaatttttgtatttttagtagagacagcatttggccatcttggccaggctggtctcgaactcctgacctcaggtgatccacctgcctcggcctaccaaagtgctgggattataggcgtgagccaccacgcccggcctgttttattattattttttttcccatcgagataacttcaccattttaatcatttaagagtataccgtacagtagcttctagtacattctcagtgtaccattcttgctaattccaggatattttctttttttttgagacagagtcttcgctctgttgcccaggctggagtgcagtggtgcgatctcggctcactgcaagctccacctcccgggttcacaccattctcctgcctcagcctcctgagtagatgggactacaggcacccgccatcacgcctggctaatttttttttttttttttttttttgacacggagtcttgctctgtcatccaggctggagtgtagtggcacaatctcagctcactgcaaactccgcctcctgggttcacgccattctcctgcctcagcctcccgagttgctgggactacaggcacccgccaccatgcc[169 bp omitted]tttcactgtgttagccaggatggtctccatctcctgagcttatgatccacctgccttggcctcccaaagtgctgggattacaggcatgagccactgcgcctggcccaggatattttcaacgcttcacaaaggaatcctctacctgctaggtatccccccaattctcttctcccctcaagcctcaggcaaccatggatccaccttctatctctctggatgggcctgtcctggacatttcatagaaatggaatcacacactgtgtggccttttgtgtctcacttctgtcagctgagcgtggcatcctcaaggttcatccatgctgtggcctgggtcagagcctcgtttcttttcatggccaagtcatattctatcctattgttataccacgtttgtttatcagttaacggacatttgggtttttttcagagaatgtggcttttaaaaatctcagttttggccaggcgtggtggctcacacctgtaatctcagcactttgggaggccgaggtgggtggatcacgaggtcaggagattgagaccatcctggctaacacagtgaaaccacgtctcaactaaaaaaatacaaaaaaaattagccaggcgtggtggcgggtgcctgtagtcccagctacttgggaggctgaggcaggagaatggcgtgaacccagcaggcggagcttgcagtgaaccgagatggcaccactgccctccagcctgggcgacagagcgagactccgtctcaaaaaaaaaaaaaatctcaatctcgtggggtgcggtagctcacacctgtaatcccagcagcttgggaggccaaggtgggaggattgcttaagcccaggagtttgagaccagcctgggcaacatggtgaaaccccatgtctacaaaaaaaaaatacaaaaacgttagccaggtgtggtggtgcaaacctgtagtttcagctgctcaggaggctgaggtgggaggatcacctgagcccaggaagttgaggctgcagtgagtcgtgatcgcgccactgcactccagcctgggtgacagagtaagaccccgtctcaaaaaaaaaaaaaaaaaaacaacaaccacgaaaactcaatctctctctgtcttcttaaaaaaaagcagttatttagaaaagaagtgacgggcaatcactcggtcaggtgttccacgctggcaaggctggcctgtgtgctgcttggtgcctgtgctgggagctgtggcagcacagcttgagcttgttgtaactgcgtggacttgtctgtctccccggtagaccatgagctccctgacagcagggactgcgttttagctgtttctatccccagtgcccagcacagagctgggcacatagcaggtgtgtcatgatgtttgttggaggacctagcaggtgtctcatgatcatcactgaatgaatgagtaatggggctgaggcaggagaattgcttgaacccgggaggcggaggttatggtgggccgagatcatgccattgcactccagcctgggcaacaagagcgaaattccatctcaaaaaaaaaaaaaaaggaaaaatcgcaatctctgccaagcacggtggctcactcctgtaatcccagcactttgggaggctgaggcgggtggatcacgaggtcaagagattgagatcatcctggtcaacatggtgaaaccctgtctctactaaaaatacaaaaaatacacctggcgctcatacattttcctcccacaagcatgagccacccacggcctaactcttcatcctcctcttcaccatctccacccgcttctctgtgccccatatgggtatatgtcagcttcttctggttcccaaggggaccttcactggtgccattcctgctctctggaacgccgctagctcctaccccttcccatgcttctgacaactcctctgtaaaaatgtcacatcctccgaggggcctcctcgatcacccagtgctaaacactctcctctctctctctttttttttttgagacggagtctcgctctgtcacccaggcaggagtgcagtggtgtgatctcggctcactgcaacctctgcttcctgggttcaagcaattctctgcctcagcctcccgagtagctgggattacaggcgcccgccaccacgcctggctaattttttttgtatttttagtagagacagggtttcaccatcttggccaggcaggtcttaaactcctgacctcgtgttccacccaccgcggcctcccaaagtgctggaatgacaggcgtgagccaccgcacccgggttctctcttacaaacggggtcttgctctatcactcagtctggagtgcagtggtgtgatcatagctcactgaaacctctgcctcctaggctcaagcgatcctcctgcctcagccccttaagcagctgggaccgcaggcccacaccgccacaccttgctaatatgtgcatcttttgtagagagggggtttcgccatgttgccc[131 bp omitted]tgcctgtcaccacgatttggaattgtctgtgtttaaatggcaatgttcagggtctcccgctagaaaaccagctcccaggggcaagggagatgccacggtcacttctgtgttcttgatgcccccggcccagtgcccgacactcatgactgctcagcaaacgttggctcagtgtgtgacccggtcacgtgcctggcacataagaagcatcagataggtgtttgtgatttctgtggctgtcactgcctgagcgggcattttgagtgtaggagaaatagcagtgcctggatggtagaagcccagaggtcttgtcctagcttggcttcttcctcctgataattgaatgacttaaaaaaaaaaaaaaggaaccatttcttttctttttttatttttttgagacagagtctcactctgttgcccaggctggagtgcagtggcgtgatctcggctcactgcaacctccacctcgtgggttcaagtgattctcctgcctcggcctcctgagtagctgggattacaggcgcccaccaccacacccatctaatttttgtatttttagtagagacagggttttgccatgttggccaggttggtctcgaacacctgacctcaggtgatctgcctgctgcagcctcccaaagtgctgggattataggcgtgagcctccgcgcccggccagggcagccatttctggacctcttgacatggtctcggcactgtcttaggtgctccacctcccacttccatgctttcctggtcacaggcctctgaggtcaaaactgagccatccccattgcccagaagtggtcactgaagcacagagggttgaagtcatttgccccaggtttaaccctgaagcccgcggcccgaccctagtgcccaccatacacgaatccatctcactctcctgccttcgttcttcggctcttctgggcctcggtttccccatttgtaaagccaggagacaacacgcctgacattcaggatcccgcatgtggttgccgtcctctgggtcatagtcctgatggggaaatccacccacgactggtggtgacgcgcgttctctgccccgactcccacagccagtgagctcctccgacagcgaggcccccgaggccaaccccgccgacggcagtgacgctgacgaggacgatgaggaccggggggtcatggccgtcacagcggtaaccgccacagctgccagcgacaggatggagagcgactcagactcagacaagagtagcgacaacagtggcctgaagaggaagacgcctgcgctaaaggtaggggaggaccaaggtgggctggcccttcatccccttgccctgatgtctcgcctggcagcttgctctcctgccctttttttttttttttttttgagacaaggtcttactctgtcgcccaggctggagtgcagtggcgtgatctcgactcgctgcaacctccgcctcccaggttcaagcaattcttctgcctcagcctccctagtagctgggattacaggcacctgccaccgcacttggctaatttttgtatttttgttagagacggggattcaccaggtccccaagttggtcttgaactcctgacctcaggtgatctgcctgcctcggtctctcaaagtgctgggattacagtcttgagccactgcgcctggccacctttctttttttttttttgagatggagttccctctgtcacccaggcgggagtgcagtggcacgatcttggctcactgcaccctctgccactgggttccagcaattatcctgcctgagcctccccagtagctgggattatgggcaccaccaccatatttttttttttttgagacggagtctcattctgttgccaggctggagtgcggtggcacgatctcagctcactgcaatctccacctcctgggttcaagtgattcccctgcttcagcctccgaagtagctgagattacaggcatccaccaccacgcccggctaatttttcgtattttagtagagacagggtttca[132 bp omitted]tatgcatttaaaaaaaattgagttatagtccatacaccatgagattcatccttcctgaatatacacctcagtggtttttagtgtgttcacggaattgtgcaaccattaccattattccaggagatttccgtcaccccaaaaagaaacctggtccccatcagctgatcctccgcatcccctcctctggcccctggcacccacacatccccttcctgcctctgtggaggggcctgtcctgggcatttcatagaaatggggtcacacactgcatagcctttgtgtccgccttccttcaccaagcgtgacgtcctcagggtgcatccgcactgcagcccgggtcagctccattcgtttcatttatttatttattttgagacggactctagttctgtcgcccaggctggagtgcaatggcatgatctctgctcactgcatcctccacctcccgggttcaagcaattcttttgcctcagcctcctgagtaactgggattacaggggcccgctaccacgtccggctaattttgtgtttttggtagagacggggtttctccatgttggccaggctggtctcgaactcctgacctcctgatcagcctgcctcggcctcccagagtgctgggatgacaggcgtgagccaccgcgcctggctgcctcccttccttttcctggccgggtcagattccggtgtgtggagggaacacggtgtgttgatccacatgtcgctggccatttgggttgtttccacttttgggccattccagatcaggctgccgtgaacgtttctgtacagagttttgtgcagatgtgtgtgttccattctcctgggtatattctctgtcctgccttttgaccatttctcactatttgggtgtagaaacaaaggaccagattctagcagcaaattcttttgatagagtcacgtgtactttgtattattttctgattctaaaatgataagccatatttatagtagataacttggaaaatgcaaagaacagagagaatttggaaaaaatacctgtagtatatgaggggtttctgagccaaggaaggattatttcttttttttctcttttttttttttggcgggtgggggatggagtttcactcttgtcacccaggctggagtgtgatggcgcaatctcggctcaccgcaacctctgcctcccaggttcaagcgattatcctgcctcggcctcctgtgtaggtgggattacaggcatacgccaccacacccagctaattttgtttttcagtagagatggggtttctccatgttggtcaggctggtctcaaactcccgacctcaggtgatctgctcgcctcagcctcccaaagtgctgggattacaggtgtgagccaccgtgcctggccaaaattagccatttttaagtgccccgttcagcagcattaagcacattcacgtggttgtgcaaccatcaccaccatcatctccagaactttctcgtcttcccaagctgaaatgctgtcccatgaaacactcactcccaccacccacccccccacccccccacccccccaccccccccggcgcagccctggtgcccctcatcctactttctgtctctgtgagtctgatggccctagggacctcctataagagtttgtctttttgtgactggcttctttcaccaagcataatgtcctcaaggttcaagatccctggtttgatcaggttctcagagggttcctggcccgccagagaggttccagagctcagctgtcgtgggtggtgggcagtcagctgggggcttcctgccaggagcccggccttcccatcactgagcattcaggccgttccccttccagatgtcggtctcgaaacgagcccgaaaggcctccagcgacctggatcaggccagcgtgtccccatccgaagaggagaactcggaaagctcatctgagtcggagaagaccagcgaccaggtgggccagtggctccttgggatggcagggaagcgtggtggctgccagtgggccccagttcagctcacttctctcccccaggacttcacacctgagaagaaagcagcggtccgggcgccacggaggggccctctggggggacggaaaaaaaaggtagcgtgcacttgactttgtttcccatgcccactcgtggggcacctctgcggtctccagtgctgtccccagggcagggcgggccatttctggagggggtgggacacggactgcagggtacccgaggggaccgcctctgccctgagcgtggcacctcgttatggccgcactgcctccaggagcccaccatctggtttggaaaggggcattctgggatgctggcatcagaagggagggaagcagtcctgacgcgcctgcatgagagtgagagagtgagaaagcaagagcgcgagagggacacagaagagaggagagaggtgtgtgccagtgtgtatatgagcggattgtgtgtgtgtgttctgtctctgtgcacgtgtgtcgacgtgcatgtgtgtgtgtgtacttgtgtgtatgcatgtttgtgaccatgtaggtgtgtatgtgtgcagtgtgtgtgtagattgtgcatgtgtgatgtgtgtgtcgtgtgtgcacatgtcgtgcctgtgtgtgtgtttctggtgcctgtgtccctgtgcctgtatgcctgtgtgtgtgtgtgctgtacctctcctctgcgtctatgtgttgtgcctctgtgttcctatgtgagtatatgtggtgcctgtgtgtgtgcctgtgtgtccatgtgtgcatactgttcatgtatctatgtgtctgtgtttgtgtgtctgtgtgtggtgtctgtgttgtgtgtgtttgtgtgtctggtgtgtccatgtgtatggtttgtggtatgtgtgttgtctgtgtgttatctgtgtatggtgtgtgttttgtttgtgtgtgttgtctgtgtggtgtgtgtgtctggtatgtgtgttgtctgtggtgtgtggtatgtgttgtctgtgtgtggtgtgtggtgtgtgtggtgtatgtgtgttgggtgtttgtgtgtctggtgtgtctgtgtctatggtgtgtctggtgtgtgtttctggtctgtgtgttatgtgtggtctgtgtgtgttatctgtgtggtgtgtgtgttgtctgtgtgtgtgtggtgtgtgtggtgtggtgtgtgttatctgtggtgtgtgtgtggtgtctgtgtggtgtgtatctgtgtgtgtggtgtgtgtgtgtggtgcgtgtgagttgtctgtggtgtgtggtgtctgtgtgtagtgtgtgtgtggttgtgtgtggtgcgtgtgtgttatctgtgtgtggtgtgtggtatctgtgtggtgtgtgtgttgtctgtgtgtggtgtgtgtgtgttatctgtgtggtgtgtggtgtgtgtgttgtctgtgtgtggtgtgtgtgttatctgtgtctgtgtggtgtgtgttgtctgtgtgtggtgtgtgcgtggtgtgtgtgttgtctgtgtctgtgcggtgtgtgtggtgtggtgtgtggtatctgtgtggtatgtgtgttgtctgtgtgtgtgtgtggtgtgtgtgttgtctgtgtgtggtgtgtgtgtggtgtgtgtgtggtgtctgtgtgtggcgtgtgtgtttggcagggtactcgggtggaggcggtagagcacggcagcttgtctgatgtggcctccgcacaagattttgcataaagaaaaagatgtccccactgggaaacccgggcttctgatgtacccggttcactgaggaagatgaggggaagggccagcagctgcccggcgtgcccagggccgcctgggatcccggttttcacttggggtggaggtgggttttgtgggtgggaggggattcggagccgggccctgagccgaggcccgcagagcctggcggctgcaggggtgcgggagcctcctctggcctggtgcgccccgcttctcacggtggggctcctgatgctcacgcctgtccctgcttctccccagaaggcgccatcagcctccgactccgactccaaggccgattcggacggggccaagcctgagccggtggccatggcgcggtcggcgtcctcctcctcctcttcctcctcctcctccgactccgatgtgtctgtgaagaagcctccgaggggcaggaagccaggtagggccctcgtgctcgcacatctcttggcctggcccctgccggggcgctcccaggcagtcccctggtcaccttggagccctggaagggaaggtcaccccctcctcctcttcctgtagcggagaagcctctcccgaagccgcgagggcggaaaccgaagcctgaacggcctccgtccagctccagcagtgacaggtgggtgctggggctggggtcccctctggcggctcctccatcggctgaggggcagggcgggctcctgagggaggaacggaggtccccaaccgccccctccgcctccagtgacagcgacgaggtggaccgcatcagtgagtggaagcggcgggacgaggcgcggaggcgcgagctggaggcccggcggcggcgagagcaggaggaggagctgcggcgcctgcgggagcaggagaaggaggagaaggagcggaggcgcgagcgggccgaccgcggggaggctgagcggggcagcggcggcagcagcggggacgagctcagggaggacgatgagcccgtcaagaagcggggacgcaagggccggggccggggtcccccgtcctcctctgactccgagcccgaggccgagctggagagagaggtgagccgggagggcgccgggagtccctgccttcactccacacgtttatggagcatctactaggtaggaggcagtatcccaggttccgggacccatcaagaaagcagtgcgtgggcccagaaactcctgccctggaggaggggacattcatgggagggagggggccgggcttggtggctcacgcctgttatcccagcactttgggcagctgaagtgggacgattacttgagtccagctcgagaccagcctgggcaagatagagagaccctgtctctataaaaaccttaaaaaattagctgggcgtggtggtgtgcgcctgtatagtcccggctgctcaggaggctgaggcaggaggattgcttgagcccaggagttggaggctgcagtgagctgtcatcaatccactgcactccagcctgggccacacagcaagaccctgtctcaaaacaaaacaaaggagggaggagctgtacagatgacatgagggtagtgcgtgctgtccggagttttcggtgctaaggagaagagtaaagtggggtggggggtttctcttttaaatagagtagaccctgaaggtgtgagtagactccaaaggcttgcgtttgggtttaagtaaaaggctccgaatgggctgggcgcagtggctcacgcctgtaatcccagcactctgggaggccaaggcgggtggatcacgaggtgaggagatcaagaccagcctggctaacacggtgaaaccctgtctctactaaaaatacaaaaaaattagccaggcgttgtggcaggtgcctgtagtcccagctactcaggaggctgaggcaggagaatggtgtgaacctgggaggcagaggttgcagcgagccaagattgtgccactgcactccagcctgggccagagcgagactccatctcaaaaaaaaaaaaaaaaaaaaaaaataggctccgaatgaagggaggggatctacgaagactcctgggaggggatacattctaggcaggagaagcagctcacacacaggcccagaggactgcgcctggcgtgctggaggaacagcgaggtggcctctggggctggagtggagggaggaggggagagagggaaaaggagggcggtggggaacggacagagcaggccgggtagggccatgtgggctgcagggaggatttgggctttgaccctgagggaggtgggagccatggagggcactggacagggtagggacaggccctcactcgggtgctctcgggtgccctctggctgccatggggtacagcttgcaggtgagcgtgggagcaggtaggaggcctcctagggtggtgactgtcaggactctcctataccacgtgtggtgctgcgggccctgtcacgccctctacccttgtggagattcaggcaatgtggcctgaatccagagtctcacctagactgagtgcctggggcccacgtgctggtgcccctcagccaggcctgccttctttggggaaagcacgaacagcgccgtgttctctctctgtcactcccttcatcacagaaagggcaccgaactcctggtgcaggaggcgtttcagccacagcccaggactgctgggcaggaggagtgaagggggctgttcctccactgaatggggcctgggctccaagaaccccacgatccactcaggaccggacactgggtcctccctcctctcccatcctgccccagcaccttcaaacagtgtggagggcgacagaaagggtcgagctgcatctcctggtagtgggatgggctaggggtctgggtaatcccctcttcccactgctccagcgcgcccttcctgactgctataggccaagaaatcagcgaagaagccgcagtcctcaagcacagagcccgccaggaaacctggccagaaggagaagagagtgcggcccgaggagaagcaacaagccaagtgagccctgctctgcccctccacaccctgggggccccgcaccccgcatcaccccacaaccctcacccctcacaggggcagccccacctctgagttcagccttggagccggacccggttgaagttcctggtccttgggttgtgtgggctgcgtaggaatcgctgctgcgggagtgggatctttgcccagcccaggggtctcctccagggcgatcccgcctccagagacacggccacgtccggggacatctgtggttgtcatgactggggggtgctcctggcatggagcgggtggaggctggggacgctgctgagggccctgtagtgcccaggatgacccatcccagagaacagtccatccccaatgtccacaagcagaggaggagggagaaactgcaccccggcctaggggtttgcatcttggtccccctgtggtgggcagacagagcctgtctcccagctcacttttttttttttttttgagatggagtcttgttcttgctcttttgcacaggctggagtgcaatggcgtgatctcagctcactgcaacctccgcctcccgggttcaagcgattctcctgcctcagccctcccgagtagctgggattacaggcacccgccaccacgcctggctaatttttgttgctttagtagacacggggtttcatcatgttggccaggctggtctcgatctcctgaccccgtgatctgcccgcctcagcctcccaaagtgctgggattacaagtgtgagccaccgtgcctggctgcagcccacgtttttgtttttgtttttgtttttttttgagacagagtcttgggcttgctctgtggcccaggctggagtgcagtggcgccatctcagctcactgcaacctctgcctcctgggttcaagcgattttcctagctcagcctccaaagtagctgggactacaggtgtgtgccaccacacccggctaattttttgtatttttagtagagacggg[147 bp omitted]cccatgagaattcggcaggccggtatggcagtggcggggtacagagcagcacatggcaccgagcctcagcaatgggcctctctcctgcacgcgtgtcacccttgagggccttttcctagctcgctgactctggtagacaaagccagcccttggccatgtgaacgaggaaaagaatcctgggatttcatgagaactcgggaaaaggcttgtatctttgggcagctcgagcctgtggctgccctggtctgccctaggcctaggctgtggcagggcctccccgcctcccgtttcccggcttagctcccagggcctcccaaaggtttcctttgcagtgggtttgggtccaccccttcaggcgccagcccctcagtggcagagtgccggtgacggggcccgactgaggggagcacttctccacaggcccgtgaaggtggagcggacccggaagcggtccgagggcttctcgatggacaggaaggtagagaagaagaaaggtgaggcctggctgcccagcactgcccacactgagttcactgaggggaacggggacagccgtggcgtggctggcctgtcccgcctgtccctagagagggtgctcagcacatcctcggccggcctggccggcggtgcctccaggggtgggggctgagcctgcagacctggggcccccatgacaaatcctccagaggctctcaggctcctgcccttgaacagctggccccctgtggccctgcctgggcccacacggtgctctctctcctggcccagagccctccgtggaggagaagctgcagaagctgcacagtgagatcaagtttgccctaaaggtcgacagcccggtaagaccctcagggcctgtgagccaagcagtccccgctgccacctccctgccaggctcccttagatgtctcgggaaactgaggcaaagccggggtcctgcagttgggtgggccaggagtctgttccggttgctagtgagcgcatggggtctcctggccaagggccctgggggagctggtcctgacatgcagcacccagctttcccggcaggtggtgtgtggaggcccccaggaccaacccccacgtacctgggaccccaagtatctggctatccctggagttccccgtcaactggacgggggctgaggggagctgttctgcagatacagctcccctcaaggagagcccaggatgtcttcctccacccatcggggccctgggacccctggggatcccttggccaggccgtctccctcactcccaccccaccctgcaggacgtgaagaggtgcctgaatgccctagaggagctgggaaccctgcaggtgacctctcagatcctccagaagaacacagacgtggtggccaccttgaagaaggtatggcgggggaatcagaggcgcagggtgcagtcgggggagctgggagcaagtgcctgcccgggagcccaggcccccagcaggttcctgtcgggacagccctgggtcag[137 bp omitted]tggtgaaaccccatctctactaaagatacaaaaattagccaggtgtggtggcgcacgcctgtaatcccagctactcaggaggctgaggcaggagaatcgcttgaagctgggaggcggaggttgcagtgagccgagatcgcgccactgcactctagcctgggtgacagggcgagactctgtctcaaaaaaaaaaaaagaaatgcctgctgcacagagctgtgctcccgggaggggctgcgggaggggcgcattgctggggcgaggggttcagagccggggctagggccgctgcacttgggtgagccaggcctcttctcttggtggccagattcgccgttacaaagcgaacaaggacgtaatggagaaggcagcagaagtctatacccggctcaagtcgcgggtcctcggcccaaagatcgaggcggtgcagaaagtgaacaaggctgggatggagaaggagaaggccgaggagaagctggccggggaggagctggccggggaggaggccccccaggagaaggcggaggacaagcccagcaccggtgaggggcgggtggggtgggccctgtacctcagtctcctcagctgaagaaacagatgctttgcagaacattccagaaggggagtacagctctactctctgccccaaacctgccagagtgtcatgtcctgttggggtctccgtgcagacccggctttaatccctggggcagccagtgaggggcattcaggtcctaccgtgtgccaggcagccagcatgcaggtaacttggggctcacgccagaggggtgacggggacagtgcatgacagcacacgcctccaccgtctcccaccctgggacgcccagagaggggggtggctctgtgcagcgggggcaaagagtgggggcattgttcagagaggcagtcggtggaggctcgggggcggaggcctcaggtgcccttgcttgcctggtgggccgacaggagatgaggtgtgaccctcggggctgctggctgtggggctactgggctgacatggccccattacaggtgctcagagcagccctttggagatgggatgggcgagcttgggatggggctttgcggcccagggggcagccgaaggctagtgtcttttttttcttttttcttttttttctgagatggggtctcgctctgtcccccaggctggagtgcagtggtacaatcacagctcactgcaaccttgacttcctgggcgcaagccatcctccacctcagcctcctgaggagctgggattgtaggcctacaccactatgccctgctaattttttttttttttttttttttttttgagacggagtcttgctctgtcccccaggctggagtgcagtagcgtgatcttggctcactgcaagctccgcctcctgggttcacgccattctcctgcctcagcctcccgaggagctgggactacaggcacccaacaccacaccaggctaatattttgtattttttagtagagatggggttt[141 bp omitted]tgctggcatgttactcaggctggtcttgaactcctgggctcaagtgagcctcacgtctcggcctcccacgtgctgggattgtgagcccccgtgcccgaccttgtcttcctttgtctttcccaggctgctgtgggcttttctcagggctgcccacgttccctcatttcttgggcccccagttctgcaggccagtgtggctcgggctggggctggctgcagcatcccatgtcaggagcttgcagactggacagcaggtgctggggtccaggtggatgggcatgtgtcacccacggcgctcagcttggcccctggtccagtccttgacaggcaagggttctggggtgcccagctggagcccagcagtgtcctgtgacccctctgtcccacccagatctctcagccccagtgaatggcgaggccacatcacagaagggggagagcgcagaggacaaggagcacgaggagggtcgggactcggaggaggggccaaggtgtggctcctctgaagacctgcacgagtgagtgtcccgggccgtggggtttggactcctgagcggcagcggtgtgacgcgcaccctgggtccgagccgctcctcctgtgccagtccctctgggatgggtcccagggatgtcgtccttactcgggcctcccaccttcacagctgaccccagggccccgctggctggcacttccggcggcccctacagagaggcagctccagggctttgagctgcctgcccctggcctcctgggaaggtggcttcttgccgagcctccagggtggcccaggtaggtaggccccgagcacgggcacccggctatctgacggtgcctgtgcccatcactgtgggctgctgtctggtacaaggctcagtggagtcactcacttacccagcagctgccttgtgctatgcctggctggcgccagcgtggggaccctggagatggttgtggtctctagtggcagaagacaggcagataggagggcggcactcgagcctcaggtgccacaacgggggtacactcctcggtgcccatcccacccaaccgccctacaggcagggcaggggcgggagggcatcctcacaccgcctttgctgttcccaccagcagcgtacgggagggtcccgacctggacaggcctgggagcgaccggcaggagcgcgagagggcacggggggactcggaggccctggacgaggagagctgagccgcgggcagccaggcccagcccccgcccgagctcaggctgcccctctccttccccggctcgcaggagagcagagcagagaactgtggggaacgctgtgctgtttgtatttgttcccttgggtttttttttcctgcctaatttctgtgatttccaaccaacatgaaatgactataaatggttttttaatgaaaaaagaaatcacttttattggcttggttttctagcattgctggtgcagtgggggcctgagctggggcgcaggcggcagtgtcactgggcccgtttgggactgggttgagccatcaggccaccgtgagaagcgactaaaaggcactctgggcccagcccaaccctgaaaggccagtggcaggagagctgggcgggagcaagctcttcccaggagacaagagggacaaaccagggcatctaagctgtgctgcctgcgccctgccccgcacccacgaggctggggggtttgatgcttcctgcatctggcagcccagggtccaggcaggtgagcaggtccgatgtggggaggacgagggtccgcgaggctaggctgggagggtggagaccaggccttccctgagagccgctgctagccgacagtggtctccagcgttcagggagcatgggcctcaggggccagcctcgactcaccccagctgtgtcacccacacaccgtgtgactttggacaggttcccctcccactcggggcttctctttcctcctctgcataaggggctgtcacgtgggcacggtcccaagcaagtcaccccgtgctccgaagttgctcattccacagtggcgtctcgtgtttgtcgtcctgcccagcgtagccgagttgcctccgtcccagtaagaattaggctgtggtgtggcgggaagggacttcctgagctgcggccccatgcttggttggctggacgtgagctgcagtcactgtgcctgatttctgcaaatggctgtgtctggcatcctagcctccgatggccatgggtgtcgggctgaggagaaggcttgggaaggctcctgacccgtcccctctcacggcccgtcacctgaggcagtccttgccgtgccagcttccccggttcagagctgagctgaatgccccggcccctcacggcccctggtgcacacggtgacccctggggcccctccacccttcctccccctgggtctggggttcctgggctcgtgtcctaggagagcatggaaaggggacgacaaggttctcttaccgggtgagtggggatatggcttcctggggaggccgggctgaacggctcctccccgctggactgagcgcagccacggcacgtctcacacccgacctgagcctgccagcctccacgacctgggctagcctgagagcacggggcccggcggccgggtccgccaccaccagtgtctctgatgcctgcagcctccccagccccgcttcctctgcagcccggcgcttgggtgggcctgaggacccagggggagtgtgcggcggaggaagggctgtgccataggcacgcagcctctgtggctgttcccagccctgtctgatccctccatagggcacagttccctgcggggaagtcctttgtctgtgttctccaggggcagctgctgggcccagcctccccaggggcctcagagccccaggtgcctggggcaggcctgtggtgggcagctggaggcagcagcagcctgtttgcttgttttttgcaccccccaccccctgcaaactgctcagtctcaagccaggctggtgcaaagccccagctgtggctgctgtggctcctggcagctttgtccccaccgtgaggccaccccgggggtcagcaaaggcagtagcagcctgccttgggatgatgatggcagtgtcgctttttctagtactttctactatgagggaatgtggttcttaagaccctcaaggtgtgtgtgctaaggccggagacccactttcagcatgagaacggagctgcccggagcctgggatgccacagcactgcctgcaccgctgatagctgggggcccgtgctgcaggactggaagagccctgctagatataaaagggttgctagcggggcaaacagatgcccttccaggctgggcacgctgctttttctctttcctaattgcagtgcttgcttggggacttcaagggaaggctcttggctggtggtctgagtgaccccaggctccgagaggggcaggcagcgctggggaggaggtgggagatgcaggcaggcccggagcagggcgtggggtggctcagttaagaaggtcactgcctccgcagcccctcggcgctcagccagctgcagccccaaaggtctagggctttagggaaccgatccaggtttgggggcggggagaaagttctgaggcagctcctccctggacagagcagggcgaccccgcgccgggcctgcaggctcctacagctactgcccgccagcgggcaaggcgaagggccctaccagccagctgagcgggggattgtgctgtaggccctccagcagctgctctaacccctgccaagcctggtgcacaccctcgcggctctgcaccagccgctctgcgggcagctcctctacagagccagctgaggccacgatgccatagagctcacagaggctgtgccgcgcccgccccactggctgctggagctcggcgggcaggccctggaggctggagaccaggccactgtaggccgtgtgcagctgccggagaaggccgcagaccctggacagaaccccggcatcccgctcctgtgggaggaaggcgcaaggtgagtggagacccatgggcggggtggggggaccctagccctgtgccagacccacctcctggacagcagcgtcctccgcactggcacctgagccctggtccagacgtggctgcccttctggagcctgctgggccttttcaatctggagagagagtacagtggggaaatgatggcttcttggcaaatgacctttcacaacccccacctccccctcccccagggacctgggcacattcacagtcctgggagaaaggccacgagttccaagtcagttgtaccacagtgggcgtgttgtcttgcagaaagaggcaatagttcaaacttccccatgaggtcatcagggagtgcacgtaacacagtgtctgtggggtcgtgtcactcctcacccctaaacctgtggctgcccagtacccttaagataaaacccagctcctcaccatggccttggtgggctggcccctgggacacctctggcctcatctcccatggcaccccactgctgtctccactgaggccacactggctccattctgccctccggccactccagcaggcttctgccccagggcctttgcacacactgcccactcagccgggagcctgcttcccgggcccttcacaaggtccgcgttcggcctcagctccaggtgacccttggtgagaccttcctggcccatggtgtggcagccccagtccctcccgtcacatctgcccctctcctcgggagcacagcgtgcggctttggtgttcattgacttggtgtttatccgcccctggcaggggaacactcaggactctgtcctcgttgttgctgtgtccccagcacgtggcacccacgccccaccctgtccacagggccccatcttcctcatcatctcaatggctggtagggatgcggcacgccgtcaaaatatcgactccagactgctgtcgccctcccagccctcgccgcgccagtgctggagacctgaagccagctgcatatgcagacgcgtcccctcggtgcccaccaggcatctcccctcaccctgtccaaggccaggctcctaatatccactctgcaacccgcccggcctcccctcagcccccctgctctccttgtctgctcaggttacaagcctcaggggtctcttggggtcttctctcacctcccacatcggacccgggcagctctgacttcgaaacacccagagcccagctacttctcaccaccacagcgtgactcctgaggcccggcagcacttgcctgggtttacgtcccactgtctcctctggccctcgcccccacccggtggcctgacctcccccatcagagtgatccttttaaatgaaacccaccttggatcaggccgctcctctgcccagagccctccagggctcccaactcccttggggtcgaagcccaggtccggcccaacctgccccatcccctcctcactcggctccagcctcccaggcctccttcctattcctccaacatgccgggacagtcctgccccagggcctttgcacgggccgtgccctccgctcagatcacactcctgcccattctgacgcactccctctctgtcatttagacctgacttcaagtgtcccctcttcagggtgaccagccccagcacagccacttccttatcctggtacatgttccattttccaagcatcatccaacgcgacgccctatatattcatctgtgaattgtcttccccaaccatggcgccccccaccccccaagggcaggcctggatatccagggtcttcagtagcacttaaaggaacaagtgagacatgatgagtcacacaccacatcccatttcccagcccagcatccttcacgtgtggccctgagcaaagctcttctcttcctgtggcctccttctccccttctgaagagtgcctgggctgagttctggcccaggctactttgctgtgaggattcaaaggtgggaaaatgctttgtgatcagccgcttgcagcgtgctgcgagggtgggcccattccttcattcctccatggcgtttacaggaacgccttccaactgcgccattgtaccgcgtgccagaggcacggcagcgactgtgcatctgggggtggccacagtgacatgaggtgtcctgagggtccctaggacagacttgcccttggcactgtggacacgggggctagatggttctctggggtggggccaccctgggcactgcagggtgctgagcagtgtccctactctccaccaggggcttcccccagttgtgacaaccacagatgtccccagacatggactagtgtcccctggaggcaggtcatccacactgagaaccctgggttagaccctcaaactgcggcttgtcacaaaccccggatgttgatggaaaacacagtggcctaggctgcacgccaggaatcctgaccgagggcggcatctcaaggtttctcacggcccgccggggtgggactgctgtccaccaacatgtaaaacctgtgactgctgggcacggtggctcacgcctgtcatcccagcactttgggaggccaaggcaagaggatcgcgggagcgcagaagctcaagaccagcctgggctacatagggaggccccatctctacaaaaaatttaaccaggtttggtagtgtgcacccagaggctgaggcaggaggatcacttgaacccaggagtttaagaccagcctgggcaacatagcaaaatctaatctctactaaaaatacaacaacaaatactaagctgggcgtggtggtgcatgccagttgtccagctgcttgggaggctgaggtgggaggatctcttgaccccagtaggttgaagctgcagtgggccatgatcaagccactgtagtccagcctgggtggcagagcaagaccctgtctcactgtctccaaaacataaacccctagagcagtcctgtgagatttctgcctcccgggctgcacaacagcttctagaggaaatgttggccctcaggactggggacggggagactggaggccagggacgctgctcagctccctgcagggaccaggatgatcccaccccagagcacgatccggccccaacgtccacattgccaaaggggagaacctaggccagaggaagagagcggggccagtgggaggggtggacgactctggccagggtgcatgacccctggatgcatccgagtcatgttgcgttgggtcctttcctgcgtgcgttgcagccccaggccctgcgggctccctggatcccatcctggcttcactttacccagccacagcgccgcctttccattccccgaacacacccagcttgctccccggtagcttgctgtcctgtccctgcttttgggggctttgcagagctgtctccccatcggtcaggacagggcccagagggacggccttcctgcccagcccacatccccctctgcacacagattgttttgctgtctttgtgtccccaccgtctttatttttttgagacagagtcttgctctgtcgcccaggctggagtgcagtggcaccatcttggctcactgcaacctccgcctcccgggttcaacctcgcctcccagattctcctgcctcagcctcccaagtagctgggattacaggcgcctgccaccactcccagccaatttttgtatttttagtagagacggggtttctctgtgttggtcaggctggtctcgaactcctgacctcaagtgacccacccgcctcggcctcccaaattgctggggttacaggcgtgagccaccgcacccagcctacccgctgtctttaaggatctgatctagctccgtcccccttgccaggaggcaagccccatgagtacagagccatgaccattggtgacgctgacagcatcatctcctaggtgctcagtcagtatctgcagctgggtgagtcctgggcaggggttctaagaagtgccctggggacggggcagcagcagggggaagctcttaccagcctgaagcagtcctggagctgggccagagtgtccctggcttggaactggccgtgctgcaggtggctcaccgcgtgttcaaatgcccgctggcggaagctgggacccaggtcacctaaacgaacgaagtagctcccctgttccgccgacagcacctttggcccaggctgggaggcagccagctgagctggaaaggaaggcgcaccgctcagtcccggaagcccctcagggcatcagggctttataaaagtcaagtgagggccgggc[137 bp omitted]tggtggcgggtgcctgtagtcccagctactcgggaggctgaggcaggagaatggcgtgaacccgggaggcggagcttgcagtgagccgagatggagccactgcactccagcctgggtaagagtgcgagactccgtctcaaaaaaaaaaaaaaagttaagtgaggccaggcgcggtggctcacgcccgtaatcacagcacattgggaggccaaggcgggtggatcacctgggatcaggagctcgagaccagcctggccaacatggtgaaaccttatctctactaaaaatataaaataataataattagccgggtgtggtggcgggcgcctataatcgcagctactcgggaggctgagcaggagaattgcttgaacccaggaagtgtggaggttgcagtgtgctgacactgccactggactccagcctgggcgacaagagtgagactctgcctcaaaaataaataagtaaaaataaaagtcaaatgaagctgggtatggtggctcatgcctgtaatcccagcactttgggaggctgaggctggaggatcacttgaacccaggagtttgagaccagcctgggcaacatagagagacaaaaaacatacaaaaaaatacatagccgggcatggtggtcctagctacttgaggctggagcaggaggatcacttgagcccgagagattgaggctgtagtgaacgcaccactgcactccagtgtgggtgacagagcaagaccttgtctctaaaaaaatgaaaaagggccaggtgctctcacgtgtaatcccaacactttgggaggctgaggcaggaggatcgtttgagcccacaagcttgagaccagcctgggcaacacagggagacccccatctgaaacaaaccaaataaatacatttttaaaaaaaaagtcaagggcccagctgggcgtggtggctcacgcctgcaatctcagcacttgggaagctgaggcgggcggatcacgaggtcaagagatcgagaccatcctggctaacacggtgaaaccctgtctctactaaaaatacaaaaaattagccgggtgtggtggtgggcgcctgtagtcccagctgtttgggaggctgaggcaggaggatggcgtgaacccgggaggcggagcttgcagtgaaccgagatcacgccactgcactccagcctgggcaacagagcacgactctgtctcaaaaaaaaaaacaaaacagtcaaggacctgctagcagctgtgcctgcctcagggacccatgaacccaggcgtcccctcaccttgctcctccgcattcatggggtggaagatgtcccccagcccctccaactcattctgcagcattgccaagcgtggggcttcttcggggccgtgtgtggtggccaaaagccccgtgtcctccctgcctggggcggccccttgggtgaacgtcgccacgtcagtcgcaaggcccttggtagtggctgcggcttcccaggcaggctccgggcctacactgagcacatccgggggcgtggagatgccagagaacggggcctcttgggggctcagggcagtctgctccccaccattgtctgtggtcctggaactggtgagtccaccccaggaggtggcgggggtactaggtaaccagttctggaaggtgctgaggccagtgtgggtggcccctgtcgccacgttccctgaccccatgagcccagcggacactgcgtctttggttccggtcagcactgtcttggtggtgtccaggcccccctggacggcccctttggccatgctcatggcaccggtaaccccactgaagacagtgtccttggtacccataagcacagccttggaggcgtccacgccggtctgcacggttcctttggccacattcactgcccccgtgactccagtagtcactgcatccttagcgccactcagcaccgtcttggctgtgtccacacctgtctggacggtccctttggccacatttacggcaccagtgactccactgcagacggtgtccttggtaccggtcaggacagtcttgctggtgtccacgccggtctggacagtccctttggccaagttcacagcccctgtgagcccagtggacacggcatctttagtgccagtcaggacagactttgtagtgtccaggcccccctggacggcccctttggccactttcgcagcaccggtcaccccactgccaagggtgttctttgtacctgttgcgatattttgggtcgttttcagcccagtttgcacagcacccttggccacgttcgcagcaccggtgaccccactgcagacagtgtccttggtaccggtcagcacggtcttggccgtgtctacacccatctggacggcccccttggccacattcgcagcaccggtcaccccactgcacacagcatccttggtaccagttaacacagtcttggtggtgtccatgccggtctggacagtccctttggccaacttcacagcccctgtgagcccagtggacacagcatctttagtgccagtcaggacagactttgtagtgtccaggcccccttggatggcccctttggccacattcgcagcaccggtcaccccactgcagacggtgtccttggtaccagttaggacagtcttggtggtgtccacactggtctggacagtccctttggcgacattcactgcccccatgagcccagtagtgactgtgtccttggtgccggtcagcacggtcttggccgtgtctacacctgtctgggcagcccctttggccacattcacagcactggtcaccccactgccaaaggtgttctttgtacctgtcgcgatattttgggtcgttttcagcccagtttgcacagcccccttggccacgttcacggcactggtgaccccactgtagatggtgtccttggtaccggttaggacagttttggtggtgtccatgcctgtctggacggtccctttggcgacattcactgcccccacgagcccagtagtcactgtgtccttggtgccggtcagcacggtcttggctgtgtctacacctgtctggacagcccccttggccacattcgctgcccccgtgagcccagtggacatcgtgtcttttgtacctatgaccacagacttggtggtgtccaggcccccctggacggcccctttggccacgttcacagcactggtcaccccactgcagacggtgtccttggtgccggttaggacagtcttggtggtgtctacgccggtctggacggtccctttggccacgttcacagcccctgtgagcccagtggacacagcatctttagtgccagtcaggacagactttgtagtgtccaggccgccctggacggcccctttggccacattcgcagcaccggtgaccccactgcagacagtgtccttggtaccagttagaacgatcttggtggtgtccacgcctgtctggatggttcctctggccaaattcatggcaccagtcaccccactgcagacggtgtcctttgtacctgttgcgatattttgggttgtgttcagcccagtttgcatggcccccttggccacattcgctgcccctgtgagcccagtggacatcgtgtctttcgtacccatgaccatagacttggtggtatccaggcccccctggatggcctctttggccaagttcacggcaccggtcaccccactgcagacagtgttcttggtgccagttaggacagtcttggtggtgtccacgccggtctggatggttcctttggccacattcatggcaccagtcaccccactacagacggtgtccttggtacctgttaggacagtcttactggtgtccacgccggtctggatggttcctttggccacattcatggcaccagtcaccccactacagacggtgtccttggtacctgttaggacagtcttactggtgtccacgccggtctggatggttcctttggccacattcatggcaccagtcaccccactacagacggtgtccttggtacctgttaggacagtcttactggtgtccacaccggtctgaatgcttcctctggccacattcactgcccctgtgagcccagtggacacagcatctttggtgccggtcagcacagccttggaggtttccacgccagtctggacagtccctttggccaagttcactgcccccatgaccccagtagtcactgtgtctttggtgccggtcagcacagtcttggtggtgtccacaccggcctgtacggtccctttggccacattcactgcccccgtgagcccagtggacaccgtgtccttggtgccggtgaggacagccttcgaggtgtccagacccccttggacggcccccttagccatgtccatggcccctgtgaccccgctggacaccacctccttggtgcccgtaagtgcagaccgagtggtgtccaggcctccctggaccactcccttagccacgtccaccacgctggccaccccggaggacacggcatccttggccctggacatcttggaacacaccaggtctttggccccggacaccatctgctgagaaaggacacaggtggatcaagagaaggactgagaggtgtactccaccccgatgtctgccagcccagccccctagtgtgctttggggcaaggaactgcaggcacccagaggccccacctcctcaaaaagcaagctgcttcctcctcaccccgaccccggtcagccagacattcatcgggctgtggtgtggcaccctggctctccgggatgaagtcctcatgagctcacagcgccagcctcttccattctcacgcaccccctttcccggctgcaggcaggcctcgtccatgacagcatgtcctaggcttggactcagccagggtccccaggcctggactcaacgcaggtcctacagttacatttctgttcctcttgcttattctccattcatggcaaatgttgagcctggcgtcccagggacaccagggagactaaattgcttattaaaatcattatatccaggctgggtgtgatggctgatgcctgcaatcctagcatgttgggaggccaaggtgggaggatcacttgagcccaggagtttaagatcaacctgggcaaccaaacaagacccagtctctacaaaattttaacaactggctgggcggggggcacacctgtagtcccagctatttgggaggctgaggtgggaggattgcttgagcccaggaggttgaggcaatagtgagatatgatcgtaccactg[177 bp omitted]tggtggtgggcgcctgtagtcccagctactcgggaggctgaggcaggagaatggcatgaacccgggaaggcggagcttgcagtgagccgagatcgcgccactgcactccagcctgggtgaaagagcgaaactctgtctcaaataataatgataatgataataataataatatattcaggctgggcacagtggctcatgcctataatcccagcactatgggtggctaaggcaggaggattgcttgagcccacgagtttaagagca[144 bp omitted]gaaaccctgtctctactaaaaatacaaaaattagccaggcatggtggcaggcacctgtaatcccagctactctggaggctgaggcaggagaatcgcttgaacccaggaggcagagattgcagtgagccgagatcgtgccattgccctccagcctgggtgacagagcgagactgtctcaaaagataaaaaaaaattaaaaaacacaaaaatgaatgaagatgatgatggcctaggagttctaactctcgggtgtacctgtgaggtgctactttttttgtttgtttgttttttgaaacagagtctcactctgtcacccagactggagtgcagtggcgagatctcggctcactgcagtctccgcctcctgggttcagtaatttttctgcctcagcctcctgagtagctggtattacaggcgtgcaccaccatgcccagctaatttttgtatttttagtagagatgaggtttcaccatgttggccaggctggtctcaaactcctgagctcaactgatctgcctgcctcagcctcccaaagtgttgggattacaggtgtgaaccaccgtgcccggccaaggtgctattttaattcagtagttttcaactgggtgattctgcccccagggggcactgggtgatgtctggagacatctgtagttgtcacaacttggggaggctcctggcatggagtaggtggagaccagggatgctgctcggcaccctgcagtgcccaggatggccccaccccagagaatgatccaaccccaaatatccacagtactgaggttgagaagcccggaaattgtattctcagaacacatctcccagctttggctcaggtgggcaccttgggccctgtagttggagagacccaggttcaagtcccagctttttaccctctcctgctcccgacactcgctgtgtggccttaggcaagccacatgccctctctgagctaatatcctcatctggaaaatgctgattaaaacagatcctcttgccaggcgcagtggctaatgcctgtaatcccagcactttgggaggctgaggtgggtggatcacttgaggtcaggagttggagaccagcctggtgaaaccaacatggtgaaaccccgtatctactaaaaatacaaaaattagctgggcatggcggtgagcacttgtagtcccagctactcaggaggttgaggcaggagaatcgcttgaacctgggaggcagaggttgcagtgaactgagattgtgccactgcactccagcctgggtgaaacagcaaaactgcatctcaaaaaataaaagtagaagaaataaagtgcttacgctgctgtcgctttggtctcatcttgccaggcacagccctgtgtagactggaaccttacgtgattagagtggggtagcactgcacccatttcacagatgtggaaatagaggctcagaggggaagctccgcctgggatccccaggctgtctgccttccctcaggcccacagcagccccccagatagcaggaactgaaatgtcccaggagggagcagccccccagatagcaggaactgaaatgtcgcaggagggggcacccccagggctcctgccacatcagaccctgccctgcacatcctctcaccttttccgaaggttgcagctccttctccgtccatggggccgtctgctctgggtgggcagccactgtggggacaggggccggtcagggagagtgagggatgcagttagaaccatctacccggctgcccattgcacaatagccaggcacagcctaaaaggtcaggaatgtttcagctaccccgccagggacagcaggaggtgacatccacggctaccagccagacctggtcaccccccaaccccgctgggggctccccccaagcccagggccgctgttccctgaagtagggctctgtggaacttcctctgctgggtggacacccaccctgagtcccggggttcatatagcctggcatgggggaacagccccttgcccagcccgccccgcccccaccgcagctgcctgctgcctattgccaggccaaggcatgtggagcagaagtcagctgcctggggctctgggcccagagggaggcccagctcaggcggctgccccaaccctgggttccctgtcaccgtccctgatcgcccaagctgagccacaggaggctggggagcccctgggctgtgtgaccccaggggagctgttgctcctccctgggagtctggatctcactctgatgagctcagatgggcagagcacccagcctgggccatggtgcatcagaaacggagtgcagggtgggggaacggccgagggactgagtgggggggcattgcagggagacaggctgggttgaaagccaccttcggccactcaccccccatatttatgcctcagtttccccatccaccacaagatgtcctagtgtctgatgagagcacacagacaaatatggaggactccccaaatggctggaagtccctgcccggggagctccttctcccaggtccatgtgtagagtccccccacgcccccagctgggccagccactcaccctgagcctgtggttgggcagcctcggcagcaggcgctcctgtggggtcagcggccggccgggctctcgccgagctatgtgcgttggccaccaggttccgggcagagctgaagccaggcagggacccaaagaagctgcccagggtctgcatgggggcggggggtgtgcaggatgagcaggccaagcctcggcaggaacgggtcagaggaagcatcgattgatcagcccaatgccgccccggccccttgctcctgggtgacctcaggaaagtgtttcagccactcagcctcaatttccacacctgggcaatgggcagactcagcctgcctcccatgcacagaggaaaagatcgtctacccgatctccaaagaccttttccttccaggatccccactgcacagatggggaaactgaggctcagagaggggcggagctgaggccggcccaaggtcacttgctggggaaggtgtcgaggtctgcgtgggtcccccgcctccagcttgggtcagaaaggaagggattggcatcatggctcccagaccgcccccaccagcccaccagggaagcacctctccagattcgagaccccaggactgtggaggtcaccttccccggctctggggcatctccaggccccagcaagaatctgccccatttcccctctttaccttgcccttcggtttggggggatcccgtctcccttcgtctggagcagacatagtgagaacgtgagaagctggaagggggcagagaaggtgcgtgaatgggggttccctagcctcccatcccacacccactccccactgaaagcctgagcagcccgacacccacctgcaggcctggcctcaccctggtgtcaccgaagcagacgcggccccgctcacctggactgcgcggggtcccctggaggacggaccggcccggctggcagctggctctaccctcagctccctggccttatagggtccggggcaggcgcaggcccagccagcagcggcaggcggccaatgggcccgggggaggtggcctggacggtcacatggctacctgcccagcccagcatgggcccaggcccagcacctttcccctgtttcctgcccacagcttgcatcaggctgagtggctcacaggccagatgggctcccctcccgggcccctgagcctccagttccatccacgaggtgggtgtagttcaaatctctgctgcaccaggatgccttggccagttaccatctttttgcttcaggtttctctctcgtactccgcaccacgtcccgtaacatccagcttcttctctgctctcatctcccccagcttcctccttcgcttgcttcatcccagccacacaggcctcctcgctatgcctccagcgcacctggcacggtcctgccttagggcctctgcacgggctgtgccctctgcctggaacaccttccctgcaggttcccacagggcaccctcttccgcccacagaacagtgcctggcatacatttggcgcttaatacacgtttggctcaatggagcaacacagagagtggttgtgagcctctgtgagatgaggtcatgcactgaacaaatgctgccttcgcgttacccaggcagaagcggggtctcggggtctcggcaaggagcagggggtgtcctcagtgtggaggggagcccatcactctccggaagggacttgggccaaaacgcagaccaagatggagcaccagccaagctgggggcaccctaggagtggaaacccagcctggggggcttgggccaacccagggaggctccctggaggaggcgtcctgttccagaagtggtgaggatgggattcaaacccagaccctcctgttccaggaagtggtgaggacgggattcaaacccagacccaggaccttcgtgctgagcccagcctatgtgctgggctgtctgtgggtgggtgggcagaggaatggccgtaacgcccaccctgggctgtgtccccctcctacctgcccctgagacagggttcctagccctgtgttattgggggtgagagggcagaccccatgggtggctctgggcactgggctgggaggagggagggtacagccacaggatctgatgattcccaggccgtctgtctccttggagccgacactgtgtttgccaaacagtgggggaacagaagggggggtgtcccccaacctcttctaccagccagtgcttcccaagggtggctgggagagctctgggtgcccctccccttcccaaagggcagccacagcccagtgtgtggagagaaaaaattaaaaagtgatcataaacatcccagccaggatctacccctcctctgcccagcaccctccatggctcccaccttctccggggtgggagcccagggtcaaagcccaagtccccttcctgcagcccggtaggccctgcataacctgcctcgtctgctccccaccttcctctccttcttctcttcactctgctccagccacacgggccttttcactgttcccataacatgccaggacagagtccctcaaagacacacgtgactgtgcctgcttagccccgcacacccttcctcagggctttcgtgtgggttgttgcttttgcctccagcaccctttcccacatccctcacctccttccaggtctttcctcaaatatcacttcctcaaagaggcattcctggatctcctctccctttaaaaaatatatacctcaggccaggtgccatggctcaccctgtaaccccagcatttagggagaccgaggcaggaggattggcttgagcacaggagtttgagaccagcctgggcgacagagcgccaccccgcctcaaaagaacaaaagaaaaaaaaaaaaaaataaataaaaaaaatatattttatatatatatatttctgttg[131 bp omitted]ccaccacac[136 bp omitted]ggctgcccaaaatatatctttaaataaaaattaaatgaattaatgggccaggcgcggtgactcatgcctgtaatcccagcatcttgggaggccgaggcaggtggatcacctgaggtcagggttcgagaccagcctggccaacatggcaaaaccctatctctactaaaaatacaaaaatcagctgtgtgtggtggcgcacgcctgtaatcccagctactcgggaggctgaggcaggagaatcacttgaacctgggaggtggaggttgcagtgagccaagatcgcgccactgcactccagcctgggtgacagagtgagactccttccccacccccccaaagaaaagaaaagaaaagaaaaatcccagggcttagctcaacccattctcttttcctcacctctgctgcagtgaaactgatttccctactgctgtgcctttccctaagctgttccctctgccaaaatgcctacccctatgtgctgttctgatcatcctcaacaggcctggccctgccaggagcccccagcctcatgtgggaagagagagcaaggctgcctgtggctataaagtcaaggtggaaagggcaagaaaccttgagaaggtggcctgtggaggaccggaggagggaagtatccggctgggatggagtcctggaagccttcctggaggaggaggcattgaggctgggccttgaggatgtatgagatgtgtccgagggacggatggggggtgggaagagtattccaaggtggccgcacagcctcagcaaaggcccggaggtgggaatgtgcccacttcaatggtaagagagcaaagtatccaggtcaggctggaggaggaagctggaaggtgaagagtttggtctgtgggcagtggggacctgtgggagattccagaacaggagcagggaggtagatttggctggtggaagtggtcggagatcccagagctgccctctggactatgtcccagggaagtcaggggccaccctgacctcaccataccaagctgtggtttcccaacaccccgcccagccccaggggagtcggaagagcagccaggaatgcggtcagaggacaggaggaaacccccgagaccagcctatggcccttgccctgcctctgtcttcccatcctggccagtgcagctggagagaccacagcaagaccagctcctgcaggaccaggaggtagagagagagctgccccatctgactccttccccatcttttctgctccctgcaattccatgaaattcacctgtaccaagatgagaacagcttccatgcggccaaaggggcaatgctgttgtttatttttagagacagggtctcactctgttgcccaggctggagtggagtggttactgatccaagctcactgcaacctcaacttcctaggctcaagcgatcctgctgcctcagcctcccgagtagctggggcacaggctcgtaccatgtgtcattttaaaatttttcgtagagacaaggtctcctatgttgcccaggctggtgtcaaaactcccgggctcatgaaatcctcccacctcagcctcccaaagtgctgggattaccgatatgagccatggtgcccggctaattttaagtggtaatgcttaccccacatgggctgggcagtaacggtggatcccagacaggatgacaggcaggtcagagaagcaccattcttctagatcttgaactctggctctacacacccccttctccatgtctcagcagtgacacacctccgtggcccccagccccctgggactgagactcaccctggctggaacacacacgtgggcctttcaacaacaaaaaggacctttattctggaggcaaatcccaaacagcaaagcaagcgagtatggcaggctgagcagcacggcccatgggcagaggagggctcacttttcaaagttccaaatagggcaaaatgtgtgtttccctaggaagtattttttaaaaacatttttgagatagagtcttgctctgtcacccaggcgagagcgcaggggcaagatcatggctcactgcagcctccaactcctgggctcaagcagtcctcccaccttggcctcccaaagtgctgtgataacaggtgtcaaccaccacacccagtcagggctcacttttcaaagccccaaacagaaggcattgggcaaaatgtgtatttcttcgggaggctgttactattattttttgttagatggagtctcgctctgtcacccaggctggtgtgcagtggcgcgatctctgctcactgcaagctccgcgcctctcgggtttaagcaattcttctgcgtcagcctcacaactagctgggactacaggtgcacaccaccacacctggctttttttttttttttctttctttctaagtagagacagggtttcatcatgtt[134 bp omitted]caggacataggtgaagaacccagcttgtggctcaagttggcctgaatagggttcgaggccctgctcccccgggcctctttgtccatgtgttcaaggaaaaaatgggagagtccaataccaaaaaggtggtcagagatccggagttgggcctgattccaaagaagggtcaaggccaaggcctcgagcttacgtgtggccaccagggggcagcagggatcggggtgtgcaggtggcctttcctccccgcctccactggcccatgggtcagaagtccagctcgggcatcagggtgtgcttgaccgggcagctgggggtctcgggttcctgctcgcagatgtccccggcaacacccatcctgtccccatccccattcccactcccgtccctgtgctctgcctcccaggctctctgctgggccggccagtccaggtgcgcccagcgggggtcagggcccccgatgacctcgtccaccaggtccgccaggtcgggcaggggctcgggtcgctccacaaggatgggcgcgaagggtcccaccagccagggcagcggcacggcctgcaccaccagctccagcagctcgtccacgcaggcgtgcgcgtgggccacgcgaccccggccctcggccagcgcggccgctggcacgtccctgaagcagcgggcatcagcgaaggcggtctgcagggcatccacactgcgccgcacctcagccaccttctcctgggcgccggcgggcaggccccgcacgctggactccagagcctctaccgtgccctgcagctcctgggtcaggctgcgggacagcaccagcgtctccagctctgcctgcagggggcggggacctcagtttcccctatggacgcccaggaggactgctgtcctgcctcggtttctctgatggacccacagtggagctgtcaacctgtctcatagacctcatagtcctgtcccctgtagacacagaatg[143 bp omitted]gcgaaaccccgtatctaccaaaaatacaaaaattagctgggcgtggtggtggacacctgtagtcccagctacttaggaggc[136 bp omitted]atggtttctaggctataggttcagggagagaatgtggagggagggaaagcgagaaggggcgggaagccagggactactgcttgcttgggccaacacccccctttccccccacctccctccatctcaaaaataaataaataataaaataataaaactccatctcaaaataaatacataaataaaacacacaatgggacttaaacctgcctcagtttccccccccagacacctcaactagctgagctcagcacttggtttgagatagcttgagttgggtccccggcagtactgggctgacccgcagtccgtcgctccccctcttcctccgcggcctggtggcagacaccacctcacctggcactcctgcggtctcacctggctccggcggcggctctccggagggcgctggccccattccccccacagctcgtgcaccttcccagggcaggccggggcggtgggggtcaccccacactgcatgtggtctatctgcaaggacagaaatggtggtcttcagagctgggggagctgggggagctgggggtcggggtggggtccaggaccactgatctggcctcagtaagcatttaggagaccgaggcaggttgtgcagggccgtggggaagacttgggcttggaccccaagggaggtgggagccatagagggctgtgggtaaagaagggacagacctgactcaggggctcacaggtgccctctggtggctgctgcggggagggaagagctgaggatgggaggattctgatgaggaggaaggctctcttctgacctaccctaacttgctataaattccagcttctccttcccctcttccacaaaacccctccctgactctccaggcagagccatgacatccctgggctcctccaggcccgggtcccccagccctgaacacatgcagctggagacagctgcacccagctccgcctcctgctttaggctagcacgggatccggtattcagctggtgctcaatccatactgattggcctgcatcccggagcaggggcgggcagcgggctctcaccagctccagcgtctcctgcagctgggccagggtgtcctgggcacggtgtttgctctgcctcagtttccccacagagtgctcgtaggccaggtggcggatccgtgctgacagggagccgaggcgcacaaagtagccctgctgtctcctctgatcctccaccgaacccacttcagggccttcagcctcagccgccagtgccgctggaggacaggatacggggacagcacggggacaggatacggggacagcacggggacaggatacggggacagcacggggacaggatacggggacagcacggggacaggatacggggacagcacggggacagcatggggtcagcacagccacccaccccctccacatctgctcacccacctctgggtacagaagccacaggttcccacattcacagttccccttgactgacatcaacccatttggtcttccccaaaccctaagatgtaggcactatggtgggccctgttttacacaggaggaaaactgaggcaaaggagaggtgagatcctgcaggatccaagaagcagacccagattggaacccaggcacgttggtcccaaactgcttaaccattttttttttctttgagatggagtctcgctctgtcccctaggctggagtgcagtggcactatcccagctcactgcaacctctgcctcccaggatcaagcgattctcctgcctca[133 bp omitted]ggcctcctaacgtgctgtgtttacaggtgtgagccatcatgcctggcctgcttaaccattcttttaagcagccttttaaaaatataggttgggtgcagcagcatgcacttgtaatcccagcactttgggaggccgagatgggaggattgcttgagcccagggaggattactttgagactagcttaggcaatacagcaaaaaaccctgtctctaaaaaagaaatacagaaattagccagggctgggcacagtggcgtgtgcctatagtcccagctgcttgagaagctgaggcaggaggatcaattgagctcaggaattgaaggctatggttagctacgatcacaccactgccctctagcctgggcaacagagcaagactccatctcaaaaaaaaattaaaattaaaaaaatgaatgaaaaataataaaaaaagagaaaatccacac[135 bp omitted]agaacaagaccccatctctaagaaaaaaaatttttttttttgagatggagtctcgctctgttgcccaggctggagtgcagtggcgcaatctcggctcactgcaagcttcacctcccaggttcacgccattctcccacctc[211 bp omitted]tggtgtgcacctctagttccatttgtctaggaggatgaggcaggagaatcacttgaacccaggaggcggaggctgcagtgagccaagatcatatcactgcactctagcctgggcgacagagtgagactccacttcaaaaaaaaaaaaaaaaaaaaaaaaaaaacaacaatggttgggcgtggtggactcacgcttgtaatcccagcactttgggaagtcaaggcaggtggctcacctgaggtcaggagtttggccaacatgcaaaaccccatctctactaaatacacaaaaattagccgggtgtagtggtgggtgcctgtaatcccagctacttgggaggctgaggccggagaatcgcttgaacacgggaggcagaggctgtagtgagctgagatcgcaacactgcactccagcctgggcaacaaagtgagagattctgtctcaaaaaaaaagaaaaaaaaattcaggagtgcctggcacacaagaagtgcctgatcaatgcctcactgcctttttttttttttgagatagagtctcgctctgtcacccaggctcaagtgcagtggtgcgatctctgctcactgcaagctccaccccccgggttcacgccattctcctgcctc[174 bp omitted]gcccggccgcctccctgcttttctgctgaggtgggggtaagcccatacattcttccagtactgtaaggccagagttggacattcacatggtctccagggccaggcaggtaccaaaaaccatcaaagtagatatgacataaaccactggggactagtggagctgagcaaaccatctgaaggagcagacaatattctggctgtgtctagtttttctttttttttttttgaaacggagtctcgcactgtggcctgggctggagtgcaatagcgcgatctcagctcattgcaacctccacctcccaggttcaagtgattctcctgcctcagcctcccgagtatctgggaatacaggcacacgccaccacgcctggctaattttttgtatttttagtagagacgggatttcactatgttggccaggctgggctcgaactcctgacctcatgatctgcccaccttggcctcccaaagtgctgagattacaggcgtgagccactgtgcctggcagtgtgtctggtttttcaaaacaagccaagaatcgggacatgtaatgcaaaatctggttgttaaatgcatgcaaagaatgaaaatatttaaaacacgctgcacaggcatttgggggccaccagtttgggacctcaagtctaaaagccctatatgcccttagggtctgggtgttctgactcctggcgggatgcaggttgaggggccgtggaagtgaccgggagggaggacaggcctggttttgagttgtatgtttcctgctgatctgctgtgtgaccttgggtgagtctcagacctctctgatctgtaccacaggggatggggacggggcaggactcaggggttagggttgagggtgtcgtcctcaccgagctcttcctccgtcatgggcaggaagtgatccaccagctcctctgatttttccagtacaacatccacagcatggctcacggagcgcttcagctccacgctccagcgccggcccctccgggccaggtccaccacacccgtgacactgctggccaccacgtccttggctgaggtcaccacctggaaggaagggcccccccactccaggcaccgtgggactccagctccatttctgccaccctagttccctggggctgggactcaaagatccctggacttctacctggctccgtgcctcagtttcccctataaaatgggtgataaaacccttccctcacagagggtgttgagggagttaactgcccttactagcaatacatatgtatacacacatacatatacatatatacacatatacacacatatacatatatacatgtatatatacacatatacatatatacttatacgtatatatacatatatacttatacgtatatatacatatatacactatacgtatatacatatatgtatacacacacacacacacacacacacacacacacacacacacgttgcagttattttaacctggctgttttttcttgagttaactaaaagcctggttgtcaccatccctccctccctcccgcctctaatctggcctgcccccactggaggtccccatgtctagtcgtccggggtaccgtctccgaaggttgctggagaaagggaagcttctcttccagcttgtccaggcccctgcaggcgaggctgttcatagtggccactgaagggagagaggcggggagtgagactcggggagacgcagagggagatagggacgcagtgagagttgtagaaggagggaatgctagagagagaagcagagacagagaaggaaggagaccaggataagacagggagaaacaaaacggaatgatggagacgagacccacaccaggagatggacaggctttctgagaccttacaccaagaagccgcttacaccaaagacgctggggcagacacctgtggcgcctggagagagagtctacgagggagatggggagaaggcctagaccacagggggacctggctgcctccctaggtgagactgggggccctgagggtgtgggtaggccgctgggttgggcactgcctcctctgccatcctgcctgggccctgccacccaccctgttctcccagcaccaaggcgacttttcagccgtgcccagctcagatggcccagcggacagactcaaggtcacagaagctggctgagagggaggtgaggaggtgctgggctaggaccctcaggtgaccctcttcctgggtcagactagaggccaaggatcctgtagtcccccgcctgtcatcggctcaggggtccacagagatgtgagaactacagagcggaggctgcggggcttaggacaggcagaggcaggtgcagaggggagggggcctggagagacaaatggacccaaggcacatcaggccaacaaaggaggggacacagggagacagatggatagggacagagaggaggggccccaccagtaaacaggtaagggcagagggccaggggatcagatttatttatttattttgagacagagtctagctctgtcacccaggctggagtgcagtggtgcgatctcggcttgctgcatcccctgcctcccaggttcaagcgattctcctgcctcagcctcccatgcagctgggattacaggcgccctccaccacgcctggataattttttgtatttttagtagagttggggtttcaccatgttggccaggctgttctcgaactcctgacctcaagtgagtgatctgcctgcctcggactcctaaaatactgggattacaggcatgagccaccgcacctatcaggggatcagttttttttgtttgtttttgcttttttttttttgaaatggagtctcactctgttgcccaggctggagcgcaatggtgcggtcttggctgactgcaacttctgcctcccgggttcaagcaattctcctgcatgagcctcctgagtagctaggattacagttatgtgccaccacaccgggccaagttttgtatttttagtagagacagggtttcactatgttgtccaggctggtcttaaacttctgaccttgtgatccaaccgcctcagcctcacgaagtgctgggattacaggcatgagccaccacacccagccagatttaaaaaaaaaattttttttttgagatacagggtctcgctacgttgctctggctggtcttgaactcctggcctcaagtgatcctccttcctcggcctcccaaagtgctgggatcataggcatgagccaccatgcctggctggtgatcagattaaagaaggacttaagtgaagagattgaggacaggtggcatggcagtgggacaggtggctaggctgaagatgacccccaggagtgtcatgcagatagaccaaggaggatgggacagggggcggtgggggggtggcaagccacagctcccagggacacgggccagggcactcacgctggggctgcaggtgctcgagcagcggctgggcgtggtccagggcacgggtggtcaggccgcacacgcagttctcagccaggcggcaggcggagcccagcagcgggtgcctgtccttggctgcactgtaaacatcgcagaccgcggtgcacgtggccctgaccaggggcagagccaccacacgctgcaccacgttctgcgggaagggtcggcatcagggggaccctgggggaagtggggccctagccacacctcaacctacttcccctctctgggccaggacgagggatgggagagtggaaggatggagtactgagcaccccgccacgtagaggcagtgaagataaacgtggatgtgagaatgtcatggttcctgcactcacaggctcctcttcccatggcgtacacagagcattacaattttgtttgtaatggggtttcactcttatcacccaggctggagtgcagtggcaccatctcggctcacggcaacctcctcctggattcaaacgattctcctgcctcagcctcccaagtagctgggattacaggtgcccgccaccacacctggcaattatattataagagggagtctcgctctatcgcccaggctggagtgcagtggcacgatctcggctcagcgcaacctccgcctcccgggttcaagtgattctcctgcctcagcctcccgaggagctggaattacaggcatgcgccaccatacccgttttttttgtttgttttgtttgtgtatttttagtagagatggggtttctccacattggtcaggctggtctcaaactaccgacctcaggtgatccacctgccttggcctcccaaagtgcagggattacaggcgtgagccaccgcgcccagccaattttgtttttatttttatttttagtagaaacagggtttcactatgttgaccaggctggtgtcgaactcccgacctcaggtgatccacccacctcaggtgatccacccacctcagcctcccaaagtgctaggattacaggcctgagccattgcacctggtcacaatttttttgttttcaatagagacaaggtcttgctctgttggccaggctagagggcagtgattcaagcacggctcactgcagcctaagcctcctagcctcaagcaatcctccaacctcagtttccaagtacctgggattacaggtgcacaccactgtgcccagctaattttattttattttatagagattgggtcttgctgtgttgcccatgctggtcttgaactcctggctcaagcgatcctcccgcttcagtctcctaatatgctgggattataggcatgagccactgcacctggccaaatactatattttttttatctgcatttggttgaaaaaggtctgcatacttctgtctcctgggttcaagagattctcctgcctcagcctcccaattagctgggattccaggcaggcaccaccccacctggcttttttttttttttgagatggagtctcgttcttgttacctaggctggagtgcagtggcgtgatctcggctcactgcaacccccgccttcagggttcaagcggttctcctgcctcaggctcccgagtagctgggaatacaggcacccgccaccacacccggctaattcttgtatttttagtagagacagggtttcaccaagttagccaggctggtctcgaactcctgacctcagttgatctgcccgcttggcctcccaaagtgctgggattacaggcgtctgagccaccgcacccagcctgacctgtgcagttcaaacccatgttgttgaagggtccactgcgatctgtctgctcgagggaggagatgttagagtctgggggttcagagcactgcccctggagcacagtggcctctgttcacttctggttcagctgcctgcaagttgtgtgaacttgggcaagccactgaactgttcggtgcctttgtttccccatctatgaaatgggttactagggttgtgatgggtgttcaaggagccaatatacatgaaacggttggaactgtgactgatacagtgattgctgctcttactattgttgttactgagggcgccatgatggtggacgtggagacagaaggatacaggtggagacccagggatcaaaggagagggaaagggttgggtaggggccacagaagccagctgggtgtctttgagagacactcccctcccagggcctcattaagcccccactaggaaatagaccatcccctccatggaccaaaatattttatgactcaggttttcccagcaaggagaggagtggggcgggatacctggcctgaaacgctcctagaagggactgtcccacacaataccttctgtccctgctccatgggaggggcagccctcacctgctggtcctgctcccacacactggatctggggatctgagccgcctcttcttcagacatcgtgctgcaaacagggtcaccctgcggggcaggattgagtaaggggagcacctgcccaggcatcagatcctgtcaaattgggctctgtgacttgagcaactctcaaacctcttggggcctcagtttcttcatctgcataatggggcattctgtggagctcagacaatgcatgtccagagctctgtacacagagggtgtccaataatgagcctctggcaaggtagggttgccggagtgactcgaagcatggtctctgaggtgagaaagacctgggttcaaatgctaccattaattgcggtgttatttttattatttttttaaagacagaatctctctcgcccaggctggagagcagtggcgccatcccagctcactgcaatttccgcctcccaggttcaagtgattctcctgcttcagcctcccagttagctgggattacccacgtgccaccatgctcggctaatttttgtatttttagtagaaaccgggtttcg[132 bp omitted]ctctctgggctgcttcctgttttgtaagatgtgggaggtccctgctacccctgcggcccctgcctgggcccagaactgcccaagcaccctagacggctggaggtggtagctgctgggtcccagtccactcacagctcatttgacagacagggcaactgaggtacgcagcaggtccatgctggtcccaaggtcacgcagccagctagagttacagggggggagctcgacctcgggcctcagacctgccgcctgcgatccctccggttgccaccccgcgtcctctgaggcctggtcctcgcccaactgggtcctgagctggggccaaccgggccaagggtcccagccacctgctctggccggtcatacccgtcccacgccgccggaccttcgcccaaccaccctatctggagctcctctcctaagcccgggggggcgctcccggacgccgccctcagggcactcacctgggcgcgagcggcttcagacaccagctgtctccgccgaccccaggctcgagtctccacacccccgccggtcccgcccgcccttcttatagctgctcgcgcagtgggggcctccggaactgaccaatggggagaggccgtgcgggggcgtgcccagggggcgtggctccaggcttccctcgccctctccttgagctggcccagtgccctacggttgccatagtaattcgggagcgctagattcaaaagattgagctattatacgttcccggaccaagtttggccacctgtcatcctcactgctgttgccatagagacagtccatgcgatcacagcccccatagccctgctgagtgaccttggccaactcgctgatgacttttcttattaattattattatttatcgatttttgagactgggtcttgctcggttgcccagggctagagtgcagtggtgtgatcatagctcactgcagccttgccctcccaggctgaggtgatcctcccgcctcagtctcctaagtagctgggaccacaggcacacaccaccacccccagctaactttttaaactttttgtagagacgagatgtccctgtgttgaccaggcttgtcttcaacccctgagccccaagtgatccttccacctcagccttccaaattgctgggattacaggtgtgagccattgcacccagcctctttttatttcttaatctgccccttaactaagccagaagccaggccttccctttccctaggatccccatttcacagatgagcaagctgaggctcagagatcataaaacacttgccccgcataccacagcaagtg[136 bp omitted]gcctccggagtagctgggattacaggcgcctgccaccacacctagctaatttttgtatttttagtagagacggggtgtcaccatattcgtcaggctggtcttggactcctgacctcgtgatttgcctgccttggcctcccaaagtactaggattacaggcatgagccaccgtgcccggccagggatcctattcaaacccagccctgctggacctcagaaccctgccttttcattgccttgcctggaatgaccacagatgtaggcatggtctttttatttttatttttatttttgagacacagtttcactctgtcgcccagcctggagtgcagtggcgtgatcttggctcactgcaacctccgcctcccaggttcaagtgattctcctgcctgaccctcccaagtagctggtattacaggcacgtgccactgtgcctggctaatttttgtatttttagtagagacagggttttgccatgttggccagtctggtctcgaactcctgacctccggtgatctgcctgcctcagcctcccaaagtgtttggattacaggcatgagccacggcgccaggctgcatggtcattttttagggagctgggaaaactggacatgcccccaagccccagggtcttccaaatccgattgcagcccccacatggccaatgctgtatcagcaggtgggcccgggaccctgctcatcccttcagccccatcctgcccctgcaaccttgcccgggggcaggtgcccccttcgatgatctcaggtcagcatgacaaatcgtttggagacctgggcaatctggtttaacttaaaccttctcctaggacacaagccctggcagaaatccactggtaaaatgacacccgggcaacagtcaaggttttatttccagttaggtcccaggatgggggaagggagaggagaagtcacaggccattgatcccaactgtcatcccctagggagaccatatcccacaccccagggcctgggccatgcctcttttcctccttcaccctggagtcctgggaagttgatttgagaagatgctaggaacacaatgaaagccaattcatccgatccagttttcaagggttatttattaaaccccttggttctgaccccaagctaagtgggactcagcatcagaccctgcactcagagagccccctgacttggggaagacagagtcagagaaaggcagccccagtgtggccagggctcagctggaaggaaggacaaggggctgggagaacccagagttcaagagatctgggaaacagggaacggcattccagacggagggcacaccttgggcatgggtaaggaaagcccatcgtgtgttctaggaagcatggatggatgaaacggggtcccagccgctatggacagccccgagtttcacctgtaaaaggcaggattatttgtttttaattttaattttaatttttttgagacagtcttgctctgtcgcccaggctagagtgcagtggcacgatcttggctcaccgcaagctccgcctcccaagttcacgccattctcctgcctcagcctcccgagttgctgggactacaggtgcccaccaccacgcctggctaattttttatatttttagtagagacagggtttcacc[135 bp omitted]taccagaccccccaccctcaacccaagcccctggtctcactgggacttggccactgccaggagcgtctggcccttcacggcttcaggcccagcacagcgcgtgtcattctgggaaaacatcttgtctttttgggcctgaagccaacgatagaggtcgctcaggttctggtcacagatccaggggttgccggagatgtcgaagccatcccgcatgtcccagtttggctgccctagggatgcccagagcccctcgggcacgctggccagtgagttattggagaggtccagcatgtccagctgccgcaggccctggaaggcaccggctgccaccctggccagcttgttgccgttcaggaagaggtagcgcaggtccggctgcggcaagaggagatcttttcccagtacttgcaatttgttgccttctagatgtagccgttctaattgcagcggacccctcaggaggtcaggtggcaaggtctccaactggttctccccaaggtcaagggtgcgcaggagggtgaagttggccagcagcccggggggcagtttccggaggcggttcccagacaggtccagatgccccagagctttcaggccgtgtagccacgagacctccaggacctccagctggttttctttcaataccagggtgtccagggtggctgaggcctggaagaggcccgggggcagcccggtcagggcgtttcgggttagatccagcaccctcagctgcggcactggccgcaggaattcgggcgagaggctttccagcccattgctggagaggtgcaattcttggagcttagaggcgccctggaggaggttggctggcaggtgggtcaggttgaagaattccacggccaggtgcacggtgtcggctggcaggtagccggggatttcggcaggtggttgacaggagatggagctgccatggtctgagcggaacacctggcagtctttggggctcagggtgaccccccaggctgaggctgccaacagcagcagcaggaacagagttctagaaacatggggttgaatgccccctgggctgcaggcagtaacagaagatgcttactaaaccacagtgaaaatacactcagctaggtgaaaatacaccagcaaatccgcccacttcttcccatctctgcggctaccagcctggactatgctacctcatctctcacctgtactagggcagttgcttcctcctcctcttccagcttctaccctcacccccgacagctgccagaagtggcccctgttccagggagaattataattctaggaaagttgagtttctgagtgtaactcccgcataatatgaatacacttccccatcaccagcctagcccccatgagctgttaattattcacagtccaacttgctagtttcttctgatctggcttattttctgggtcagtccttgtctccctggctctgtgttttgatgtgaactcctattcatccttcaaagccccagctccaatgccctcttttccatgaagacttctctgctctgggatcctggtctttttgtccactcttgaccaattgggtgcttggaggaagacagacgttcaggttcatgtttttgagacagagtcttgctcagttgcccaggctggagggaactggcatgatcacagctcactgcagcctctgaacatgaaaagtgtgtcctgctttggccaggtctgagggtgggcatttggccttgggaagcggtggtttacacttagcaccacaacccttggaagcctggggcttcccctcctcctccagggcttccctggcccggcagccatcagacatgatctcgacagccttggtcactgtggccccaggcctctaacaagaagcctcccccggctccctgctgcccatgcccacctgggcttctgtaggggtgtgtgtgtgtgtgcacgcgccagtctttctgtcacagataaggttgatctgtgccagccaccaggcctgtatctgctccctgtgacttctatgggttagctggaatgtcctgtatctccgcatggtctggcgttcaaacctgcctaggacaggtagtgtggggacctacctttttggtcgctgtctgctccaagaggacatggtagctctgctcttttgcttctgggttgtcctggcctgcggaggtggccttatacctgcctggactgggggcaggggaaccaaccctggggaagtccccacccccgtccagttcctgataggggctgagcctaagccaggcaggggaaggggaggggtcaggattacaaaattgcttcctggaaattgtttcctgttcaacccctttttgaccctgcttctagaacacaggtttttctttccttgcttcctgatttttggggggcatccaagagtctctctagttgcatcctcacttcccccaacccggagttcaagggtcaaggtttgcaaggcactattcctggagacagggacagctctctgagcaagaggagggatttaccataaacttgagcaacccagaagctcactgaaaagaacaaaaaaactcgtcttgatttcatggtatgttgatattgctttttttaaaagaagtcattttaaaaatacagtccaatagtgagtaatgccaaacgtctctacggtccttagacagtggcttgggaggaaccaaacctggttctgaattccagctctgtcatgaacacctttgctttgtgacctttggcaagtgacttaacttttcttggcctcagtttccccatctatgaagctgaactcaaatctccaagggctccttctgcccttttttctcttcatctgaatctgacatccatgctattgtttccattcttcctcatttcctattaaatgcgtttggaggctacaaatttccctttgagaacagctttggctgcatctcatggacttggctgcagagtgcttgcattcttgttgagttctaaatatttaggtatgatggtgtcacctttatctgcagctatgactattttttttttctttttttttttgagacagagtcttgcactgttgcctaggctggagtgcagtggcgtgatctccactcactgcaagctccgcctcccgggttcacgccattctcccacctcagcctcccgagtagctgggactacaggcatgcaccagcgtgcctggttaatttttatatttttaatagagacaggattttgccatgtggcccaggctggtcttgaactcctgagctcatgtgatccactggcctcggcctcctaaactgctaaaattacaggtgtgagccaccatgccccgtcatttttttttttttttgagacagcattttgctctgttacccagcttggagcagtgtggtgcaatcatagctaactgtagctttgaccatgggtccaaggcctcccaagtagctgggactacgggcacgtgccaccatgcctggctaattttttttgagatggagtctccctctgccacccatgctggagtgcagtgatgcaatttcggctcactgcaagctccacctcctgggttcaaacgattctcctgcctcagcctcccgagtagctgggaatacaggcacatgctaccatgcctggctaatttaaaaaattcttttgtatgttacctaggctggtctcaaactcctgggctcaaggaatcttctcagtctctcaaagtgctggggttatagacgtgagccactgcactccgtcagtcttgtgccctgcccagtctccggagcccagccgttagttggtcttaatcaacatggactgagaggaaggaaggcttgtgaaatgtagtgacacagtaacaaaacgatccattaaaatgaaatgagatcacatccctgcttaaaactctctgatggcttcttgtcccacttaaaacaaaattcataaggctggccaggcgcagtggctcacgcctgtaatcccagcattttgggaggccgaggcaagcggatcacctgagttcaggagttcgagaccagcctgaccaatatgatgaaaccccgtctgtactaaaaatacaaaaattagcggggcgtggtggcgggtgcctgtagtcccagctactggagaggctgagacaggagaattgcttgcacccaggaggcataggttgcagtgagccgagatcgcgccactatactccagcctgggtgacaaagtgagactctgtctcaaaaaaagaaaaagaaaaagaaaaagaaactggctcctatgcagatgaagatggggaccccgaagtctccatgtttccacactcagctccccagatttgttttgacccagccttttttttttttttttttttgagacagcgtctcgctctgtcacccaggctgtagtgcagtggtgtgatctcagctcactgcaacctctgactctcagattcaagctattcttctgcctcagtcggccgagtagctggaattacaggaacccgccaccaagcctggctgattttttgtatttttagtagagacggggttttgccatgttggccaggctagtctcgaactcttgacctcaagtgatctgcacacctcggcctcccaaagtgccgggattacaggcgtgagccaccgcgcccggcctggccttgacttttgagggtgcccccacccgtgccacccccaggaggcagagcagagccagagtcatgggggccggtggttgtaaacagagttttattgatggggagggggctgggggaggcaaactccagagagggcagaggacccagccagccacgtggcatgcatggtcagctggaggtcagaggggggaggtcacaaggggacgggtggcatgggactctctcaccaccctggggccgtatttacagaggggccccacccaccttcgccgccccccaggcccccaagccctttagacagctgctgccgatgtgacttccgggcaggccctcctcgtgtctcctgcctgaaaccccggcattgtccccgcttccctctgcagagtggggggggttcaaactcctaaccggcacctcggagacccccgggccttctggaagccccagcgtcggctcagccaacgcccaggccgctggggccaccacgatcgtcgctcgtggacacacaccctgcacgcgtggcccacttgacacacacgcccacagcagccttcgctggcacgcacacacacgcccacctccccggccccttgcacacgaacacggcacgcacacgcacgcacacccacacacgccaggggcctgggttggggagggacctttccaggggtgggggagggcttaggtctgcagctgtggccccccattccccaccggcgtccaagcctcccctgcctgccgccaccccgagaacggagttgtgcaattggttagaaaaccgcaaaagaaaccaaaactgcaaaaaaaaccaaaacctacgcgcataaggtcaacctcaaatccatagcaaagtcctcccgcccacccacccccaaaccgtctcagcgtcctgcggccccgggtagggggagggcgagctggttgtgcttccttgtggcggagggggccccccactccgcgggtgggtcgcgggggggacttgagcacccactcggagttgccccgggccccggcgttctggcaccgtctctcgctcctggttcccgtggctggcactgccaaggcatcggggggcccccggcctagggcacggggggcgcagtcctgtccgcccccccataggggaggaggtgggccaagtctgtgcccggccgggcgtggcagccgcggtggcggtccccaggccgggcctcgccgctgttgaacgtgtgggtgcggcgcagggtggcggccggaggggcgtgggggcccagtggcctcctcaggctgcccgtcgggggcgggctccagggccgcgggaggccatcggcggctgaggctgggtccaaggggcccgtgggcgcggacaccacccgccggcggtccgggctggcgtggggggtgagcgggaagtcgccgtgggaggcgcggccgggccgggcagcatagaggcggccgtcgggggtcggctccccaggcgcggggggctgctcgggggcccgggcgggcgccagcagcaggagggaggatgaagcggaggccgggagcagggggtggccgtggtcccaggcgcgggggcccagggcgtgggggtgcgggtgcggagtgggcaggcgcttctgcggcagcggcgtctgctcgggcgtgggcagcagccccgagtccaggtcgtggggcccgccctgcagcagcgtggccttggcccagccgttctgcatcaggggcgccagcagggcctccgggggaaccccggcgccaccgccaccgcctccgccccggcccccgggaccctgcgccctgcgctcgcccaggcggctgacgctcagcaccgcctcgcccgccccgtgcgccaggatggcctccttgtccttgcgccgggccagctcccgccgctcacggaggcccacgaaccagcccacgctgaagccggacaccacggctcccaccacgaaggccgccaccgacgacgttaccagcaggttcaccgacaccagccccgcgcggtcctcggagaggctggcccgcaggagtcctggccggggagcacaggggggttagtggggccggcggggtggccctgggcatccctcctacctcctcggggccctctgtcctcttttttattatttttatttttttttatttatttattttttgagaaggagtcttcctttgtgtgccaggctggagtgcagtggggcgatctcgattcactgcaacctccgcctcccatgttcaagtgattctcctgcctcagcctcccgagtagctgggaccacaggtgcccaccaccacgcccggctaatttttgtatttttagtaggatggggtttcaccacgttggccaggctggtctgaactcctgaccttgtgatccgcccacctctgcctcccaaagtgctgggattacaggcataagccaccacgactggccttatttttattattttttaattttttttgtttgtttgttttgagacagtcccccaggctagagtgcagtggtaaagctcactgcaaccctgcctccagctacctgtttgttttattaaagacaggatctgggccaggcatgatggctcacacccataatcctagcattttgtgaggctgaggcaggagatcacctgaggtcagaagtttgagaccagcctggccaacaagtgaaacccatctctactaaaaatacaaattttagccggacatggtggtgtgcgcctgtaatctcagctacttgggaggctgaggcaggagaatcaattgaacccgggaggtggaggttgcagtgagctgagatcacactactgcactccagcctgggtgacagagcaagactctgtctcaaaaaaaaaaaaaaaagacatgttctcactctgttgcccaagctggagtacagtggcctgatcacagctcattgcagcctccacctccctgggctcaagcgatcctcccgcctcagcctcccaagtagctggaactacaggcatgcactgccacgtctggattatttttgggtttttgttttagagacagggtttcactatattccccaggctggtctcaaactcctgacctcaagtgatcgtcctgtcttggcctctcaaaatgctgggattataggcaggagctgccgcgcctggccccttctgtcctgttgaagttggtctgtctgccttctgttgtctcttcgtccttgccaaagcctgcctgtttcttggtgtctctgttcttcccctatctccctccccaataaatgagatgagaccaccccatgcctttcttttctttttttgagacggagtcttgctctgtcgtccaggctggagtgcagtggcgtgatcttggctcactgcaggctctgcctcccggattcacgccattctcctgcctc[224 bp omitted]cccacccacctcccagaggattcgagggtcctccagcctcctccctcccctcccccatggtagtgggggatgggggtcttagcctgccgtccccccaactcacctgtgcagtcccctaagcctgaggtgctggccccggacacgtcctgctcaaaggcggctctaatggggagaggaggcaccgtcagcagaggcccctctcacagtcagagatcagggggatctgggatcatgggcgggtctgacacaccctccacccacctccctctcccgcagtacctggtgcccgggctgaggaagatgcaggagccgtcgggggcccacccgcagtaggggtcctgactgccgatacagttcctagagcagaccagggaccgaatgggacaagtgtccaagtcacttacacaaccccaatggtgatggtgacctgtgggccctgttccaagcacctgcctctttatttttattttaattaattaatttttgagacggaatttcgctcttgttgtttatttatttagttatttttgagatggaatttcgctcttgtcgcccaggctggagtgcagtggcgggattttggttcactgcaacctccgcctcccgggttcaagcgattctcctgcctcagccccccgagtagctgggattacaggcacgcgccaccatacttagctaatttttgcatttttatcagagacagggtttcaccaggttggtcttgaactcctgacctcaagtgatccacccgcctcggactcccaaagtggtgggattacaggtgtgagccaccacggctggcgttttcttattttaaaattaaaaaaatttttttaaattaaaatttaattttttttttctttaagagacagggtcatgctctgtcacccaggctggagtacagtgtcatgatcatagttcactgcagcctcaacctcccaggctcaagtgatcctcctgcctcagctttctgggtagctgggaccacaggtgtgtgccaccacgcccagctgatttttgcattttttttttttttagagacaggctctcactatgctgtgttgcccaggctggtctcgaactcctcggctcaaggagtcctcctgccttggcctcccaagtgctgggatgacagacgtgagctaccaagcccagtccctcttcttaatagcaacttctggagtccttagaacaaatctgtgtgcagggcactgttcactccccactttacagataagcaaactgacgctccagaaagtaaatgtttgcccaagtggcagagctgagatgggagcccaggcatcgtgccagaggctgtgcccttggactcggagctactgggtcattgttgcaataacggcgggcaggaagcagggtcctccgcattgacggctcacatggagtgcaggcgtgtgccagcactggcatgcatcctagctttcctcccattttagagacggggaaacagcctccaccctggtccctggttctccttcccctgcagtctcctcctggcagcagccaccagagggcacctgtaagcacctgagtcagggccagtccctcctctgcctgcaaccctacatggctcccatctccttcaaggtcaaagcccaagtcctccccgaggctcacaaagctctgcacaaactgcctcgtcctctcccatcccctccccgtcctcccctcctccctcactcccccttgctcactgtgctccagccacaccggccaccttgctgttcttccaacacaccaggagtggtcctgcccgcgggcctttgcacgggccatgccctctgcccagctcaatgaccaggacatcattgggcttttgactggaacccagctgtccctccctgtgcccatcctcccttgcttcccgcccacggctggcctggggtggacactcacttcatacaccccgagtactgctggcagcgagccacaggcactcggaccacgcagcgggggaaggcagccagcaggccccccgaagctgcgtccagctccaagctcagcagccgctgccctgtctcgccaccgccgggccgtccacacctggggacaagcagagtggtgaggctgagcgcatctcagcccatctcccctcctgctggcgaccccttcccacctttgcccagacttacctgtccggccggtaggtctcaaactcctccaggaagacactgagcccagacgtccctgaggtgctggcattgggccggacgaggaacttgaggaccgtccccgcctcagaacccaggaagacaacggtctggttgccccaggggccggctcccacgtccacagccactcgagtcagctggtgcctgggggacagggcaggggagggtcaggctggccccatatcaccacatgccaccaacacgggcatggccatagttacacgggtgcatacagacactgacacaccaacacatgtgacagcaataaatgcgtgtgtgcatggatgccggggacatgcgtgactacacaggcacgtgggcacactcgcccttttttgaaacataaccccaaaccaggctctcctcagccctgtctctttggttgagatggagtctcactctgtcacccaggctggagtgcagtggcgcaatctcagctcattgcaacctccgcctcccgggttcaagcaattctcttgcctcagcctcctgagtagcagggactacaggcacacgccatcacgcctggcaagtttatgttttgttttttttgagacagagtctcactctgttgcccaggctgcagtgtagtggctcgatctcgcctcctgggttcaagcgattctcctgcctcagcctcccaagtagctgggactacaggcgcacaccaccacaccgagctgattttcttttttttgtatttttagtagagacagggtttcaccatttggccaggctggtttcaaactcctgacctcaagtgatcctcccgtcttagcctctcaaagtgctgggattacaggcatgagccactgtgcccagccccgctttctcctgatatgtatgtgtgtctgtgtatctttcagtctctttctctctttgtctctcttccctatctctgtctctctgggtgtctgtctgtctctgattgtctctctccctgtctctctgtctctttccccctttgttctcctggtgtgtgtctgtctgtctacctctttttttttttttttttttttgaggtgtagtctccctctggccccaggttggagtgcagtggcgtgatctcggctcactgcaacctccgcctcccgggttcaagtgattctcctgcctcagcctcccgagtagctgggactacaggcgcccaccaccacgcctggctaatttttgtattttattttattttatttttgagacggagtttcgctctttcgcccaggcgggactgcagtggcgtgatcttggctcactgcaagctccgcctcccgggttcatgccattctcctgcctc[222 bp omitted]ggccagggtggtctcgaattcctggccttaggtgatctggcagcctcggcctcccaaagtgctgggattacaagcatgagccaccgtgcccagccccatctgtcacctcttgatccctctgtctctctctttgttctctctttcctagtgtctctccatctttccctctctgtctctctgtgtctccagctctctgggcagcgccggaagccatgggctcatctgtgttgagcatctggatcctctcaccctccatctaccccatcctgtctcccctcgccatgccctgcctctccaggaccgacctcatcagggtccgcaggatccagggcgcatggcccagcgagggcaccgcctcgtccatcagagggtgggtcttgacaaagttgaggatgtcatccggcaaggcgctggaggcattgtactgcatcccgggggctgcgcagcacccgggcctgggggtgacaagggtgtggtcaggacgaacgtaaaggttctcataaaggggcctgattcaccagaggtacccattgctttgcccaacgaccctcaggttttttgtttgttttgtttttgagacagagtctcaatctgtcgcccaggctggagtgctttggctcactgcaacctccacctcctgggttcaagcgattctcctgcttcagccacccgagtggctgggattacaggcacgtgccatcacgcccggctaatttttgtatttttagtagagacagggtttcgccatgttggtcgggctggtctcaaaccctcgacctcaggtgatctgcccacctccgcctcccaaagggctaggattacaggcgtgagccaccacaccaggcctcagtttttcccaactgtataacgggtacagctgaactcagcatcagctaaataaccacccggaagccccagccctcggccctggggatcaggacctcatccgggcatgtgactcaggatggagggggttctcaccggggtcgaggcacctgatcctccggcaccggcgtccagatggactcgggggacttctgctctcggaagcggccttcaaacacagctgccacctgtgtcaggtcaaaggcgcagacagccgagccagggatgctgaggggttgggatgaaagagtttggtgagcccggtgggaggccccatctcggacaagtgcgtgcaggagcctctgtctgcaggagccagtgaatcttcagtcttcctaggccagagatgtcccctgtccctcccgcatctgtcgaatgcagccactcctcctgaataacatctcagattgggccacagttcagggtctacgaggccacccctgtccaggcccccatccctgtttaactggatgtcctgcctgcccagtgtcactgttagagcccactccccagcaggcttttttttttttttttggagaccgagtcttgctctgtcgcccaggctggagtgcagtgacgtgatctcaggtcactgtaacctacacctcccaggttcaagcaattctcctgcctcagtctcccgagtagctggaattacaggtgcccaccaccacacccagctaatttttgtatttttagtagagatggggtttcaccatgttggccaggctggtttcgaactcctgacctcaagtgatctgccctcctcagcctcccaaagtgctgggattacaggcgaagccaccgtgcccagtccacaagcaggctttttaaaaatgcaaaccttggccgggtgcggtggctgacgcctgtaatcccaacactttgggaggctgaggcgggtggatcacgaggtcaggagtttgagtccagcctgaccaaaatggagaaaccccgtctctactaaaaatacaaaataagctgggtgtggtggcgcacgcctgtaatcccagctactagggaggctgaggcaggagaattgcttgaacccaggaggcagaggttgtggtgagccgagatcgcgccactgcactccagcctgggcaacaagagtgaaactgtctcaaaaaaaaaaccaaaccaaacaaacaaacaaacaaacaaaaaatgcaaacctgatctcatccctcttgctcttcactcttccatggctccccagtgctctcagggaaaaagtccaagtttctgcctgcagcccacaaagccttgcctgatccatcctaccagttccctgctttcctgttgtgcattctcccctagttcccttcccacacagactctctcacgattacttaagtatactgaactcactgaagcctcaggacctttgcacatgctgtttctccaactttgaacacccttccctcttcctccatctcacacccaaagtccagctccaatgtcccctcctccaggaagccctccctgctcctctccccaaaggcagaggatgaggatatctttggcccagttctgaccaaagggacttagagggtcagtgtcagcttgtcccaccccagcctggggccgaggcctctcagaggtctaatccagtggtgcccaacctagcacccagggcatacctgaggagtgaatacaggccctctctacccatgcccaccaaatgctcccagtttgctcccattggtgggcgctgacctgttgctgggcgtggaaaaaacggccaggaccacgggccggcccccgaggctgaccacgcccgtgacagcctgcagcacgttgaagtagaaatgggagtctccgggtacagagcagttgagccgcgccttcaggaaggacgtccactgcttctccagcacgcggggggagcctcccacgtcgttcttgcacactcgggccacgcgggacaccaccacctgggcgtgacagtggacggacgggggcctgagctctgtgtcccaggaaggcctgttcacaggctgtgccactcaccacccaaactgtgatggaggagtctgaccctggctctggtgggaccccggccagtcaccgttcctctctgggcaccggcttccctggcagaaattcccggtgggaatgtcaatgatgataatagcaacagtgacaaccataatcatcactgtttccacgaagacccacattttattctcacatctcttacactcttcccgaggggggcctactgatatccccccattgtacatgtggggacactgataagaggcacagataaaaggaagtgactggtccaaggtcacaatagtagttagtggcagtctgtgcacttcagcactgcctggttgcctggatggacggatgagtggatgagtagatggacggacgattacaatggagggatgagtaggtggatggataaataaatacatctgaagaaggatgatagataatggaagagatggtgaaggagaacaaggtaatcaagcaattggtagataagtagatggatgtgtgggtggatggatgaacagatggatagagagaaagctaggtgagtggatggatggatgcatggataggtgaataagtggatgaatgaatggatggataagtgggtggatggatggatggatggatggatgggtgagttgggtgggtagatggttggatgggtgagtggatggatggatggatggatggatggatggataggtgagttggatgggtggatggttggatgggtgagtggatggatggatggatggatggatggatggatggatggatggatgggtgtgtgggtggatgggcagataaatggatggatagatgggtgggtgcatagatgatgagtgggtgaatgagatggatggatagatgagatggaagggtggatggattggcagatggatggatagatgaaggatggatggatgggtgggtggataggtagatggatgaatggatgggtggatggattggcagctggatggatggatggatgtgtggatggatggatggatggatgggtgggtgggtgggtgggtgtgttggtggatgggtagataaatggatggatgggtggatgggatggatggatggatgaatggatgggtgaatggattggcagatggatggacagatgatggatagatggatggataggtggatggactgatagatggataggatggaagggtggctagatgaatcgatgggtggatggatgcatggacagatggatgagtgcacggatggatggtagtgggtggatgagtgagtgggtgggcagatgagtagatggattaatgggctcatgaaagtgtgggtgggctgaagaacagacagatgggtaagtgggagggtgagcaggtagacggatggacaggggatgaaggatggataagtgattgtggctgggtgggtgggtggacaggtgaacagcaacagcaccaggtgtatctgacttccaactcaagtccctcgtcagggctgagtgctccacggctgctccgtagatgtcttcagcctcagggcctgatcatggctggaaaggaggccctggggaccagaaatggagggcaggaccctctcaccccatgcagggattcatggatccacctctgccccctcacttcgcatgatcagagcctctcaacttcatgccccactgcaccggcctcaccttctccaggtagttaaactccatcgcaatctcccggaagaagaagtagacatggctgccccactccaccgcatggacaaagtaaggctctgcaggacaggaggggtcagaactcagcccctgacatgacaaagggggtttctggggctaagaactcactggcttttatggtgaaggggggacataggctggttacccagacaatatgaaacagactcaaagtttggtattttgcaggggaagggaggtcagaagcctaaaatcgctgtgtctcttgctgcaaatggcaacatcaactattttttgttatcttcctccctcatgtgttgaagagctgagtcctgctatatcttttctgtggttccattttgggcttctaagccacccacttccagcgggttctactttagatccaactaaacttgttcctctagctttctagtcttcaaaaaggccaacagattccaaagatgtggtggaaatctctccaccaagctcctctgggactcttattctggtggggagatttgatgaatgtcaggttctgggccctgccaggtctgggcccactgcccttcctggtctcacctttgaaccacttggagtcatgtttcacggtgcgcagggtgggcctgtccccgaggctgcggtagatgacagcatcaatggctaggaagtcggtaacagtagctgtgaagagcatcccgtctggatggggtgggtggggaaggcaggcaagagatgagaccgcagaggccaggggctgggtgggtcgaaactcgattttctgagactgagtcctgagcctaggggagcccctgtctccaggctgagccctgatcccatccaagccccacctccatccaagccctgaccttaactgagcccctgaccccggctaagccccaaatcccgctgagcctcaatcccagctgagccccaaacctgggctgagagtctgcccatgtcacagctgggacaagtggtcgtccagctgccttctaaacaacccagacgctggagtagaaaatgccaggtcttgcctgtggctggggctgatcagatggaggttgggggggtacttaccagagaagagggcaacattggcgtgcttggggtcgtacgggcagcgggccataccgctgatgttgtctccgacgggctgcagggtgtctatctgcagggaccatggggcctgagtgacagatctcctgaccccacctagcagcccctggctccctcagccccccactccagggggaatcctgatccaccacggattactgtgtgaccttggccactcacttaacctctcagggcctcagtttactgatctgtaaatgggtttaagagtcaatgcctagttagacctgtaactggctcattacctaagtagctacggcttccccggccccctgtacaggcctcgtttggacagcgctgactcctcttgagctcagggggaggaggcagggagagtatatccaggaaggcttcctggaggaggtgacacggcctggggaaaagccatggccagcggaggtcgggcgagcagaggcctggaggttggacctggggcgcagggagtctgaagactcacgctgtagttggcgcacaccgggttgaaggcgttggaaccgcacacaaagagcgtggactcgtcccgaaggagcagcacctttacgaagtttcgacactcgccctgaggtggggacaggaggaagcggggagcgcgatgtgggcgtggtcatggtgatgggcgtggccagaacctgagttgtgtgggtggagggccggtctgttgtgggcatggccaaggcaggggctgaacctaggactggctggggacacggtgcgacccagacagggaaacactttgtatcagcaacgcaggcaaggccaggatggtgggcattgtcagactgtgggcataaccatggcaatagcagagtcctaacctgggatggaggagaaggatccgccctgggtgtggtcacggccgattggggtggggcatggtcgtgaccagaactaactggggcgtggtgggcacggttatagctgattggggccaagttgggagcgtggccagagctggtggggtgggcgtggcctgggcttattggggcgggccgggggcgtggggggcggcaggactgataggggaggggtcgggatggggacctgatcgattgggtggggagtgagctattgggtggcgtgtgaacatggcctgggcttgttggaacgaggctgggggtggtggtaggactgacaggggcagaagtgtgggcatagccagaactatttggggcgtggttatggataattgtggctaggctggaggccgggctaggaccaattgggtggggacgtggacgtggccatggctgtttgggggtgtggccagggctggcagttgggcggggccagggctgattgggggtgggttggggcgtggccagggctggcggggtgggcgtggcctggtctgattggggcggggcatgggtaatgccagggctgattcgcaggggccgggaccgagccagggccaactcacctcctgtttgcccttcatccgacacacgtttatgtcgctggggttagatctccaggtcagcttctgcagacagagagagctggtgagggggtaacgggtcccagcagccctgagtgaccccgccgtgctgggccgaatccacccagctccccggcgcagtgccgcgtccccctggccctacccctccactcccacctgcaccccttcctcaccctctggtaccgcagctccgtggacgtggggggctccagctctacgcggtagaggttgtccctgggggaggggcatagttagtgagaactgggggctccgccaccctctcccgttccatccttcccactgccaatgtggtgtgcacacgggggcatgcagggccatgccaatgcctctgacacgagcaactctagcgccgaccacacccccccaagggccccagcaggccttcatatcctgcactccacctcctgcccggcacgccccacggactgcccccaacaccatgtcccatggccttaggtcaggtgccccactcggcgcctcccaggcgcccaccaggctctctcccctcacacccttgccgaggaagccgccctgctcaacgtcattggtgacctcgtgtagttaagcccagtggtcacttccgcatcctcctcatcctctccaaagcatttgatctgtccggtctctctccttcctgggaagcccatccctagaagccccgtaatctcacacttgcttctccccacgacagcttccacctggtccagcctcaatcatagccagcctggacagcccagtcccctccaccctggtcccctggattccattctcgccccctcccagaagcagccaccagagggcgggcgcgtgtgagcacctgagtcaggtccagtccttcccctacctaaaaccctccgtggctcccaccttcctccgggtcaaagcctaagtcctcccaatggcccaacaggccctgcacgacctgctccatcccctccctgccctcgcctcctctctctctccccctcgctcattctgctcgtcacacaggcctccttgctgtccccagcaatacctgtccccaatgaacagcgtcctgttgacccgcaggactcgctggatgttgaggtcgtcagcaccttctgcgggggtcaggcgtccgggcccgctgcccacaaacacgggatagtggttcaggtctgagtgagggggtggagaggggtgtgagcaagggctgggggtgaagagagggtggcctgaggtcatgccccttctaggggtggctcctggactgcttgagtcccccagtgggggcagcagacccaactgggaacccagatactcccacgggactccacccccgcccaaagacacccccagactcacagtccctgggggccacgctaagcggcggcggctcctcaggaaagaggccgtgggcgccccccagtagcagcagcagaagcagcagggccgggcggggaggggacgctcgcggggtctgcatggcgagggccaggcgacaggaggaggtgacgcctgcgggcaaggggcggcgaggtgagcggcctgcagtcccgctcgtggccacaagacggcgggcgagagcagcagacgctccttcaaatcccagaaaaattcctcacggggataataattaataaaaacaataatggcaataataataataatacacagcactgatttaattatcagaacaactttatggccacgtgtgcgtgaaagcccaggaaacgacttcaaacaaaactgcattcggtaatttaaaactaataataattattataataatagatacaaatatcctaaaacatatatttaaaaatgcaatcgcaaaatacatgcataaaaatacttagaattaaaacacaaaaatattaaactcaaaggctaaaaaaaaaaagagtcaaaggctcttggaattttataagccacaagctggctgtgtgtggtggctcacgcctgtaatcccaacattttgggaggccgagatgggaggatcatctgaggtcaggagttcaagaccggcctgcctaacatagcgaaaccctgtctctacaaaaaaatacaaaaattagccaggtatggtggcctgtgcccgtaatccctgctactggagagctgaggcaggagaatcccttgaacccaggaggtggaggttgcagtgagccaagatcgcaccactgcactccagcctgggcaacagagcaagactccatccaaaaaaaaaaaaaaaaagccacaagctgggaatgacagtactacataaccacagaatcacagaatattccccatgccaagggcctctgtgaccctggtagatctgacctccttcccaaatccagccttttcattctccgcttgcacacctccatgacaggcacctcactacctctcacgggggactgcttcccactcccattcaaggtaactttgcagaaacttctaggtgtgtggagtggagacactctcccatccaggtaatgacatagcagcggaattcaccctctgaacccccgccctccatgctgaaggtcccagttcagagcaccccctaccagaaaggggtacagtccaggtcccggagccccgaatgagaagttcagcagcctcgtccttctgggaagtattgggcaagctccgagcccattttcctgtctgagcagcaggggtatcccccagccctgccctggccttctggctcagggattctgagcccccagaggtgaaggtgattcgcgacaatcggccctggggtgcctgccccctccaaaaacaggaagacctcgcatagcgcggctggacttcctcttcacgaccctgagcttccaggatttgtgactcagcgaacacccggattccacgtgtgttcagggcacggccctgtttccttcagaatttccttccctggctcctcccctgctctacagcctcctgtggctcccagggacccctgagtccaggccccagcctctccctgggattcaaggcccctgacctcagaccccacttcggcctaccctcccctcatgccacgggcctttctagccccctaccccagaacctaactaagagccctgtctgccctgtgcctttaaaaaaaaatggctaaaatatatataacataaaagctgtcatcttaaccattttcatttaactattattagtagtattattatttgagacagagtcttgctctgtcgcccaggctggagtgcagtggtgccatctcagctcactgcaacctccccctcccgggttcaagcgattcttctcagcctcccaggtagctgggactccaggtgcatgccaccatgcccggctaaatttttttgtatttttagtacacatggcgtttcaccatgttggtcaaactggttttgaactcctgacctcatgctatccacccacctcggcctcccaaactgctgggattacaggtgtgagccaccatgcccagcctccttcattcttattatttttttgagatggagtctcgctctgtcacccaggctggagtgcagtggcatgatcttggttcacagcaatctctgcctcccaggctcaagcgatcctcccgcctcaacttcccaagtacctgagaccacagccacgtgccaccacgcccagctaatttttgtatttttagtacagatggggtttcaccatgttggccaggctggtctcgaactcctgacctcaggtgatccactcgccttgccctctcaaagtgcgaggattacaggtgtgagccaccacgctcggccaccttttggttttttgacagtcgccatcctaatgggtatgacatgctgtgtctttcatcttgtgttttatcagaataatatttaattctagaaactatttctttaaacattaagagacagggtctggctctgttgcccaggctggagtacggtggcacaatcaccactcactgcagccttgaacttccaggctcaagcaatcctcctacctcaacctcccgagtagctaggaccataggtgtgcaccaccaagcctgacttttttttttgccgggggtgggggacgcaggggaaggtggacagagtctcactctgtcacccaggctgcgatgcagtggtatgatctcggctcactgcaacctccacctcccaggttcaagcaattctcgtgtctcagcctcctgaaaagctgggattacaggtgtgcactgccacgcccggttaatttttgtattaattttgtaaagcactttgtgaggccaaggcaagaggatcacttgagctcaggagtttgagaccagcctgggcaacatagcgagacacgcccccataatctctacagaacataaaaaattaaccaggcatggtggcacgtgcctgtagtcccagctacttgtgaggctgaagcaggatgattgcttgagcccaggagttcaagaatgcaatgagttataattggtccactgtactccagtctgggcgaccgagtgagaccctatctcaaaaaaaataaaattaatttaaattaaaacaacgacaaaaaaacacctagcaaacataaagcacttgctaggtgccaggcattatcataagtacttaaattaactcatttaatcttcacagcacccccaaggggtgagtgctcttttttttttttttttttttttttggagacaagagtcctgctctgtcgcccaggctggagtgcaatggcgtgatctcggctcactgcaacctcagcttcccgggttcaagcaattctcctgtctcagcctcccaagtagctgggatcacaagtgcccgccaccatacccggctaatttttgtatttttagtagggataaggtttca[265 bp omitted]gttcactagcattaagaacatccacataattgtgcacccatcaccaccaccatctccagaactttctcgacttcccaaactgaaattctgtccccatgaaacactcactcctcacccccctccccagcccctggcacctcccatcctactgtctcagtgaacctgatgactctagggacttcctaggagtgggtcacacagtgtttgtccttgcgtgtctggctctctcactgagcgggattgcctcaagatgcatccacactgtgacctgtgtcagggtttccttcccctttttttttttttcttgttttgagacaatatcgctctgtctcccaggctggagtgcagtggcacgatctcagctcactgcaacctccgcctcctgggttcaagcgattctcctttctcagcctcccaggtagctgggactccaggtgcacgccaccacgcccggctaattttttttttgtatttttagtatacatggggtttcaccatgttggtctggctgatcttgaactcctgacctcatgcaatccacacacctcggcctcccaaagtgctgggactacaggtgtgagcctccatgcccagcctccttcattcttattatttttttgagatggagtctcgctctgtcacccaggctggagtgcagtggcatgatcttggttcaccgcaatctctgcctcccgggttcaagtgatcctcccgcctcaacttcccaagtacctgacaccacagccacgtgccaccacgcccagctaatttttgtatttttagtacagacggggtgtcacaatgttggccaggctggtctcgaactcctgacctcaggtgatccacccgccgtggcctcccaaagtgtgaggattacaggtgtgagccaccatgcccggccaccttccagttttttgacatacccatcctaatgggtatgacatggtgtgtctttcatcttgtgttttatcagaataatatttaattctatttctttacacttttttttttttttttttgagacagggtctcactctgttgcccaggctggagtgcagtggtgtgatctcggctcactgaaagctccgcctcccgggttctcgccattctcctgcctcagcctaccgagtagctgggactacaggtgcccaccaccaaaaattagcacccggctaatttttgttgtattttttagtagagagagggtttcaccatgttagccaggatggtctcaatctcctgacctcgtgatccgcccgcctaggcctcccaaagtgctgggattacaggcatgagccactgcccccggccaatttttgtatttttagtagg[142 bp omitted]gttcactagcattaagaacatccacataattgtgcacccatcaccaccaccatctccagaactttctcagcttcccaaactgaaattctgtccccatgaaacactcactcctcacccccctccccagcccctggcacctcccatcctactgtctgggtgaacctgatgactctagggacttcctaggagtgggtcacacagtggtttgtccttgcgtgtctggctctctcactgagcgggattgcctcaagatgcatccacactgtgacctgtgtcagggtttccttccctttttttttttttctttttttgagacagtctcgatctgtctcccaggctggagtgcagtggcacgatctcagctcactgcaacctctgcctcctgggttcaagcgattctcctttctcagcctcccaggtagctgggactccaggtgcacgccaccacgcccggctaattttttttttttgtatttttagtatacatggggtttcaccatgttggtcaggctggtcttgaactcctgacctcatgcaatccacccaccttgacctccccaagtgctgggattacagatgttagctaccatgcccagcctccttcattcttattatttttttgagatggagtctcgctctgtcacccaggctggagtgcagtggcatgatcttggttcaccgcaatctccgcctcctgggttcaagcgatcttcccgcctcagcctcccgagtacctgggaccacaggcgggtgccaccatgcctggctaatttttgtaattttagtacagacagagattcaccatattgcccaggcgggtctcgaactcctgacctcaggtgatccacccaccttggcctcccaaagtgcgaagattacaggtgtgagccaccacacccggctatcttccagttttttgacagtagccatcctaattggtgtaatatggtctgtctttcatcttgtggtttgtttttttttttgagacggagtctcgctctgtcacgcaggctagagtgcagtggcacgatctcggctcactgcaagctccgcctcccgggttcacgccattctcctgcctcagcctccccagtagctgggactacaggctcccgccaccaccacgcccagctaattttttggattttttagtagagacggggtttcaccatgttagccaggatggtctctatctcctgacctcatgatccgcccacctcagcctcccaaagtgcttggattacaggtgtgagccacagcacccggcctcatcttgagttttatcagaacaatatttaactctagaaactatttctttaaacattgttttaagagacagggtctggctctgttgcccaggctggagtacagtggcacaatcaccactcactgcagccttgaacttccggactcaagcaatcctcctgcctcagcctctcgagtagctgggaccataggtgtgcaccaccatgcctgggtttttttttttttttttgggcaggggggagggagccggggaggggggaaaagattctcactctgtggcccaggctggagtgcagtggctcactaccggctcactacaacctccacctcccaggttcaagcgattctcgtgtttcagcctcctgagaagctgggattacaggagtgcactgccacgcccggttaatttttgtattaattttgtaaaacactttgggaggccaaagcaagaggactgcttgagctcaagagtttgagaccagcctgggcaacatagtgagacaccccctcacaattcctacaggaaataaaaaattaaccaggcgtggtggcacatgcctctagtctcagttacttgtgaggctgaagcaggatgatggcttgagcccaagagttcaggaatgcaatgagttatgattggtccactgtactccagtctgggcaa[137 bp omitted]ggtgaaaccccgtctctactaaaaacacacaaaaaaattagctgggcgtggtggcaggtgcctatagtcctagctactcgggaggctgaggcaggagaatggcattaacccgagaggcagagcttgcagtgagccgagatcgcgccactgcaccccatcctgggtgacacagcgagactctgtctcaaaaaaacaacaacaacaaaacacctagcaaacacaaagcacttgctaggtgccaggcattgtcataagtacttaaattaactcatttaatcttcacaacacccccaaggggtgagtgctctttttttttttttttttttttttggagacaagagtcctgctcttcgcccaggctggagtgcaatggcgtgatctcggctcactgcaacctcagcttcccgggttcaagcaattctcctgcctcagcctcccgagtagctgggattacaggcatgtaccaccacacccagctaatttttgtatttttagtagagatggggtttcaccatgttgcctag[139 bp omitted]agaaaggtaaagtcatttgcccgaagtcagggatcagcggagcccacagatcctgctccattttacttattttgataataacacacaactgaaccccaaatgtttactgcggggagtccaggccacttcacaacgaaccccatctacttagcttcagtttaccccctcgatctggggttacccgacgcctgtgcgcctccccctatccccaagaccatctgcttctctccgtgaaactcgaggagcctctgccagcagccgctcggcgcctgcctgctcagaagcggccccaacacctgccacgctgcggctgccggacacctggtcacagggagccacggggctggcgggtgcgccccgtggcgtgcggggttctccggggcacccgtgcacccacatgtctgcgtgccccaggggttggggggctcctgcctgcaaccctggggacttgcatgtactctgtgggggcgccttgttgggggagaggggccacaaagcaacagctccctccaggaggcccccagctgtcactccagctctgcaaacatgagcccactgtgcagatgtggaaactgaagctcaggaatggaaacgtcctcggggaccccctagtttagctcttcttcctgggagctctgtcctctggcgacccccatgccccacactcgccagcctcactcccagctttctgtcccgccttgcacccccctcaaccgccagctctccgtctctcttttccctcgactcacgcccctcttgggcggccttgtacgctcctgggtcccgaaaccccgtctatatccgatgacacccaccgtcctgactgtagccaggcctcccccagctccggattcggggttcaacttcccctcagccgctccaggcacggggctcatgaagtctcaccctcagccatacggggcacgaccccagaaccgcgccgccctagctactgtcaccccgtcatgggcctgaatttcctgggggaactctcccccaaccttctctcctccaggccagcgcgtctgggctgttcttggcccctgaggcttcggtgtaagttttaggatccggttgtgagttccaagacaaacaacagataaaacaaaaaccctaatggggttctcgctggagtggcactgaggctaccgatccaatcggggtcaacggatggtcgatgtcccccgacccggccccacttctgcgtcctccgtctcagctgatggcttaggacacaactggagctcatcctgacttccccgccacaccccattccaccagcctcacagccagcattagccactcctgcggcctctgccttcgagtttacgcagaactctcaccgcttcccgtccatgccgtggccactcacatccccgcctgcctggcccagctcagcccagcccagtcccctccgccctgatccccaggctgtccttcccgaaacagccaccagaggacgcctctgagcacatgagtcaggtcccgtctctcctctgcccttacccctccatggctcccacctgcctcggggtcaaagccggggtcttccctgcagcccacaaggccctgtacaacctgccccatgccctgtctaccctctcctcctccctctctcccactcatcacttggctccagccacaagggcctccttgctgttcctccaacaggccaggcatggtcctgccctagggccttaccccaggctgtgccctctgctttgggagttcccccagatacacacgcaactcacttcctcacttcaggtcatctaagagaggctccccttggaccttcctggaacccagacgcctctgccctccccactttatgccctcctctcctcccccatcacacgcaggcccgtgtgctgctgggagtgtgggtctgggaacagctgtgtgggcaccactgtcagaaatgcagaatcccaggaccaggcccgctcacccaggcctgcacctgatcaagatcctgcagggatccacgtgcatcacaaactctgagaggtg[139 bp omitted]atagaaataccccatctctacaaaaaatgcaaaaattagctgggcgtggtgatgtgtgcctgtggtcccagctacttgggaggctgaggtgggaggatcgcttgagcccaggaggtggaggccgcagtgagctgcgattgccccactgcactctgagtgacacggcaaggccctgtctcaaataaaataaaattaaaataattgcttgttggggccgggcatggtgactcacgcctgtaatcccagcactttggaaggctgaggtgggtggatcacctggggtcgggagttcaagaccaacctggccaacatgatgaaaccccttctctactaaaaataaaaatattagccaggcgtggtggtgcatgcctgtaatcccaggctactcgggagactgaggcaggagaatcacttgaacccaggaggcggaggttgcagtgagcagagattgcgccattgcctgggcaacagagtgagactctgtcaaaaaaaaaaaaaaaaaaaccccagtgaaccaggggcaccatcgacaagccatcctgccccgccctgctcagcccaatctcactggctggttggggaaactgaggcccggacagaaaacatcggcagctgaagaagtcccagaagaagagctttggctccagaactgcacagcccaggttcaaaccccggctctgcctcagctgtttgaccgcagacagtcacttcccttctccaggcttcagtttccccatctctgtacactgtgggtgatttaaaattcaaccctaaagcacctccatgaggaagaaagaatgtaatctgaaccaatgtgcggcaggtgaaatatgtttttttctacatttttttgtttcctgatagctggtctgtagctaaaattcttttttttttttgagatggagtctcactctttttgtccaggctggagtgcagtggtgcgatcttgactcactgcaacctccacctcccgggttcaagcgattctcctgcctcagcctcccaagtagctgggactacaggcacccgccaccatgactggctaaattttttcgtctttttaatagagagaaagtttcaccatgtttggccagtctggtcttgaacttctgacctcaggtgatccgcctgcctcagcctcccaaagtgttgggatgacaggcgtgagccaccgtgcctggccctttttttttttttttcttttttgcctgagcagggaagttttactttcaatctaccttgaatccttcttacttccagaagctggcttggtccctggctctgtcccaggggtaattcctagcctgggtattgagctgtccttcaagggcaatgcccactctcctctctgaccccggcaccaccaacaagccatccctttactgcatatcccaagctcagctctgaccctgccactcccctgctcaaaggcctaccatggctccccagtgccccacagaagaagaaccaattttgtttgtttgtttgttttgagatggagtctcactctgtcgcccaggctggagtgcagtggcacgatcttggctcactgcaagctccgccttctgggttcacgccaatctcctgcctc[200 bp omitted]caaggacacctcccaccctgggaataacttgaagcttcttcttgccctcacctactatcaggcatttccagcccctccctgcagaccttggctcaggctgtcccctctgctggggaacctttttagcctcctcaaggtccagctgccctcccaaccagccagacatagtaacctcacgctctgtcctccaagccctacagctgactcctgcttaccagtcaaggccatgcatgcgtgtccccgactccaggaagccttctctgactgccctggctgggcctcagtttccctgggttcccccagccacaactaccctgccctcatcttcgctcaaccgccaacttggaagcaactgcatccagctctggcgccctgtaccccaaattggaagtcacttacttactcattggattaataattatttggcaccagctgtataccagacacatgtgttcaggcatggggacacagctgtgaccgagacagctacaaagccctacccttatggggctcccagtcccgtggggagacgggggtacactacacacgttaaccaatatcggaactcgatagcttctgacaataataagcacgaccataaaaacatgaggaatgattagaggaggggacatttgagctgaggcctgaaggtcgaaggggagacctcgtgacaaggtgaggaaggtgctccaaggggaaggaactgcagaggaaaaagcgtggagactgagaccactagaggaagagacagaaggtcaaggtggatggggaggctggcacagcacagaaaggactcctggggctctccccttcactcagacacgacactcagcctcatttcttgtttgtttctaaggacagggtcttgctctgttgcccaggctgagtacagtggtgccgtcatagctcactgcagtctcaacctcccaggtttaagcaatcctcctgtctcagcctccccagtaagctgggatcataggtgtgcatcaccatgcccagctcatttttgtactttttgtagagacggggtttcgctatgttgcccaggctggtcttgaactcttggcctcaagtgatcctgccacctcggcctcccaaactgctgggagtacaggcatgagccaccgtgccctgcccgcatctttttttttgctgttgtccataaaataaagacactagctcagggcctggcacacaggcattcactttaggttaaatgaccttactgtgtgaccttaggccagctacacgccctctctgggcctctctgttccaagatgacagtgatcccaggcaggcttgaagcctccgtttctccatctgccacagcacaagggacgagggcgggatgtctgcctccagttccatacaaggagctccctatcgtccgggccgccccaggattctggctccggggccagcatccctcgggggatcgagtaacctggtcccggcagccgggccccagggccgtccaggtctggttacgggctctgcttacagctgcccctccagctgcctcggtcgcccccatcacagcccagccaggctctggggctgtctaggaacttggcaggaaggctggagggagtccctggggcccaggcatgaggggtggggcagaagagagaggcccccgtgtcccccatcctactggatgtcggttaactcatccctgcccagcctgggaggcggcctatgagcctcccctccactttttttttttttttttttttctgaagcagtctcgctggtgttgcccaggctagagtgcagtggcataatctaggcgcactgcaacctccaccttccgggttcaagcgattctcctgcctcagccttctgagtagctggaattacaggtgcatgccaccacacctggctaatttttgtatttttagtacagttggggtttcaccatgatggccaggctggtcttgaactcctgacctcaggtgatccgcccaagtcggcctcctaaggtgctgggattacaggtg[134 bp omitted]agctccgcctcccgggttcacgccattctcctgcctca[175 bp omitted]cccggcctcccctccactcttgaccttccctcctgagtcctcagttctcagagcctcagtttccccatcagcgaaccaagcatgataaccatccacatcggcttctcatgaggggtaaatgagcaacccatgataggtgcttagttaactgtcgtgactgctgtgttgccttgggttagaaccctcccatctctgagcttgtttcctcctgtgaaagatgaggataaaaatattggctccacaagggcaggggtctgtctcagttactgctgtgactccagtgcccagcatggggcctggcacacagtaggtgctcaacaaatcagctgaacgaatgtcccagcaagagcccccacttataaaatagttccaaggaggctgggcgaggtggctcacatctgtgatcccagtactttgggagactgaggcaggaggatctcttgaggccagttcaagaccagacggggcaacacagccagaccccatctctaaaaaataataataataataattagctgagtgtggtgcgacatgctacttgggaggctgaggtgggaggatcactagggcccaggaggtcaaggctacagtgagctgtgacggcctcgctgcactccagctggacgacagagtgagagccctgacttaaataatactactaatgataataataataataatttaaaaataaaatagctggccaggcgcggtatctcacgcctgtaatcccgacactgggaggccgaggcgggcagatcacctgaggtcaggagttcgagaccagcctggccaacatggtggaccccccgtctctactaaaaatacaaaaattagccgggcgtggtggtgggcgcctgtaatcccagctgcttgggaggctgaggcaggagaatcgcttgaacctgggaggcggaggatacagtgagctgagattgcaccattgcactccagcctgggtgacagtaagactccgtctcaaataaataaataaattaattaaaatagttgcaaggatatgttcattccagacttcttaaacacctactgtgcaccaatatggctggagactcagccatgctcagggttgtgcatgtccagggcttggcacagagccctgcatgcaggaagcactcaattaatgccgagtgtctcttttgcaaaggatgggactctaccctgagccgccttccacattcaactcacagcaggccaggagagaaggaattcaagatcagatttaggaagactgcacctactatgcgccatgcttttcccacatatgaacttatttcttgccggcatcaaccctcagagaccagcaccctcatctctgtttgcagatggaaaaactgaagctcagagaggttaagccattttgctgaggtcacatagcacataagggtgccatggatgcaaacgtgatcttgcttcttgctgacatttttttttttttgagacagggtctctgtcacccaggctggagtgcagtggcgtgatctcagctcactgcaacctcgacctcccaggctcacccgatcctcctgcctcaaccttctgagtagctgggactacaggtgtgcaccaccacacccagctaattttttgtattttttgtagggggtatgatacccaggctggtcttgaacttttgggctcaaacaattctcctgagtcagcctcccaaagtgttgggattaaaggcgtgagccactgtgtgaggccgcctcttgctgacattttccaagtgctcacaatgtgctacctgcccgtgatgatggcacaccctaaatttttttttttttttttgcgacagagtcttgctctgtcacccaggctagagtgcagtggcacagtctaggttcactgcaacctcctcctctcaggttcaagcgattctcctgccacaggctcccaagtagctgggattacaggcacgtgccaccttgcctggctaatttttgtatttttagtagagacagggtttcaccatgttggtcaggctggtctcgaactcctgatctctagtgatccacccgcctcagcctctcaaagtgttagattacaggcgtgagccaccgcatctggccagctgaaatatttcacagataagcaagcagagacccagagagaggctgtccctgtccccaggccactcgggaagccagggtgtgggagcccaggcagaacctccagtggggacgtggatgcatctctggggctcctggggctcctcccctccggggagggggcccccaggtaattaattttaatcactgttttgaaattgggccaccaggaggcaagtcggaaacagcaacttgtaattaggaatgggtggggcggtggggggggttgcaacgaccattcagaggaaattaaagtgtcatttatacccagcaggtaattaagggacccaggagggggtggctcgagggggctggggctccaagggaatccaggctggggctggggcgtcgagcacccacagattccaaagcaggtttggggacggacaggtcctcccttcagacccaatttggaggaagtacagaggggtgggtcgtgagcttgggacccagttgtggagttcagaggagaataaggttctgttatagggactccacttagggaggaagaaagatggcccggcctttgggggcttgatctaggggcagaaaatgaggagcccttcccctccaagttggggttctgggtgcccttccccgcactgctgaactcctcccccagaattcctccagtctctgcccctcccaagaggctggggatccccaggtggccgggaccagtgtgagaggcctggagggggccccgctgagagaggtggtggggaatgggggtggaggtctcagggagtgccaagtgctgctgggaacggaagacctggcgaatgaacttgaagaagacaaaggcgggaaataggtcccaggggaaaggccccggggtcagagcggaccacaagtcctggtgagtcagggctcaggaatgatggaggggctggcagagtgacgtgggtgctgggggatggggcttgagaaccgtcagactgtggagaacagtgttcgaggggaaggggcccccagtttgctgggtcatctcagggaggctgtcatccccatctgtgcctcactgctccccagagcctgaggctccgaccttcaaagagggacaacagcaaacacttacagggtgcctaccccgtgttcccagccctgtccctcactgagcccagcggggtaggtcacaggggctcttctgaccattccataggtgggaaaactcggggccagggtgggcaagggatggggccaaggtcgcacagcccagaaatggccaagctgggatctgaacccgggcccaggagtccagacgctgcgctgttaaccacagcactgccctgcccccagagaaaggggctttcagcctcttcacatccatctcagcaagttttgtgggtgactccaaaaatctgtcccctatccatccactttgcccccctctattacccttgcctggccggcccccatcaattattaccaggacctggtcctcaattccagcctcgcccccgtctgtcttccccaaagctgccaccagagggcaccaagagtcaggtcctgtccctcctcttcccgcagccctccatggctcccacctccctgggggtcgaagctcaaatcctcactgcagcccacgaggccctgcatgactggccccgtactctccttgcccttccctcctcccactctcccctccacactctgctgcagccatacgggcctacttggtgttcctccaacacgccaggtgaggtcctgccccagggcctttgcacgggccgtgccctctgcctgaagtgctgcttcccaagatctctgcatgaccagctccttctcatcttccaggtctcagctcaaatgtcatctcctcagagacaccctccccgacagcctcagtgaacacagccccgcccttctcagccacttgcaagataactgtcttcagggcactgactatacctgatttaccttgccctttctctagttagtgtctgtgctcccctgtccccccacccagctgggaattcgacaagggcaggatgcagtagtctatgccttggtcattgctgggtccgcggcacctggcacttaataggtgctcactaaacatcagtccacttgttaaatgcaagcaatgctcccacagctccaaatgagatcatggccagaagctccacgtttctgctttgcaaggttgttccttttcttggagtcagaaacccaacagaactatatgtggcattttgcctgcaacctcttgtttaaatggtcaaccctaagggaggcagaacagcaacccctgttttacccatggggaaactgaggctcagagagggggcatgagtgagtgagagaaaaaactgattcaatctcaagtcagtctgatccaaatgctacggctgcctatgagggcgataattcagaatggctacttcagcttccccaggggctctgagtccatggccttcaggggagggaggttcttctgcaatcatcagaaaacatatggctgccccctagtgaactcctaaacatccatcatggccctagctacagtgccccttcctggtacatcttccctgatccatgaggcagggtacagctttccctagccccagttgctccctctgccctagccctgaacctgtgtagcacgggtggccagtgcctgcccctgtttctcttcctctggcctggaagcccctccaactagacagaggagttaaagttacctctctgggatcctagcatcacccagcacaggacacagcacatggggaccactggcagcatttgttgactgactgagggacctaattgcctggaaccaggcccacctgggaacccacaatcctcctctgggttcctgtatttgggaagctccctcctaggtccgcccttggaaggctggcttagctgggccatggtgcatcctgggaaatgtagtctagagtgggccttgcctcccagtggggccctggggtggccagctttggaccctggggccagatagagaaggagcattgagggtggcaagtagtagggccccatgtccctgccaaagagtcctaagggtggtccccagcctcccaagtctcttactttttctttttcctttttttttttttgacggggtcttgctccgtcccccaggctggagtgtagtggcgtgatctcagctccttgcaacctctgcctgctgggttcaagcgattctcctgcctcagcctcctgagtagctgggattacaggcgtgagccaccacgcccagctaatttttgtatttttagtagagacggggtttcgccatgttggccaggctggtcttgaactcctggccttaagtgatcctcccgcctcggtctcccaaagtgctgggatcacaggcgtgagccaccgccactgtcttacttgtcctaatgtctgccacttcacctggatgtccctggaggagaggtgatgaaggaccgtgataacgaaaaaggattgcgtgcctgggttcctatggtcacacacccgaccccagcaccaccatgcatgatggtgagggtgtctagggtgaagggtctgttttgggataattcagccaaaggacatggggccggtggctggggcctgaatcctgggctgctttgagccttagtttccctactgctgctacatgaagacagggagggaagaaatgcacgaccatggccaagagaaagccacagcccaaccaaatcacggctgggttttggaggagtcacagtatgagagcccacaaccccttaaatacctgagactctcagaacctgctatctcaaacacgacagcagttcagaaaacccacagtacctggaaattgaaaaaaaaaaatccaggagatcacttggggctgaccaatatcaggattatttatccaggattctgcaaagacagccgtccaacccctctggcctgcctcccacgaggggcggctcaccactccttccagcaatgcatttggtttccaaggagcctgtctcctcgtagctacccttcctcaagatctgaaatgtgactcatgcccctccccctgctctataaccttccatggctccccattgcccttgggataaagtttgctccttggcttggcattcaaggctactgcctacctcatggtcctcttaaatagtctagccactcagggctcctccaacataccccactgtgatgatccttgctgttccctctgcctgcaatgcctgtccccctctcctccaggcagaatccttctccttcaagcccagtcccagtactccctcctccaggcagctttccctgctcccacctgtcctgaccactgccctggaagtttctccctccagcatctccctttccgggcccacaggacagggccacgcccagggtcagctcgggacaccttccttcccaggagacgggcggtgaccagcaacatccttcagtccccagggatccagctcacctgtcctgcaggctgacgtcatggtcacctttccaagggcagtttgatttctatcttccaggcccagtcctggtaaccccagcaaactccggctgccagcctggtgtggccactgcagaggacatgccacatctccagccccttctatgcccatcggtcagaggcgaggactgaggtctcagggggaaaggcccctcctggggggactggatacctaggcttggagacaactcacttcaaagcagagaaggtgacacagaccctaagatcctgtgggggctcagccccagccgagtctggtgggggaaccagaggcaaaatggggcaggcacagatcaagacagtctcaagcgacccctctctgcctcacctcccccaactccagtccaaaaccaaagcgcatctcctggggagactgaagcccagaaaggactagggaccagcctgaggccacacagctaagcgcctcctctcaaagctcctgcatagcccagagtcaaggggaagaagggaggagcagagcttcagggcaacccttaggaggagctgggatgcaggagagctcttgggtttcaacggcttcctcgggcctcagtttccccacctgctgttgggatgggccggttcagaacagacaagaggctgacgccaggctgccacctacccaatatccgaggcgtctctgtgtgggtggcagtgactcccagacaacttcccggagagtttaagaccccctcccaggtgagttccaactcagccttggccccagccgttccccaccacccaccccacaacctgtgctctccctatgtagagtttaaagcaattgttcaggtacatcctgaagtcccgcgcctgaaagaaactggtctcccgggatgtgggaaagggtttgggggcaagggggatgccccaggggtcctgaatttttattttggagagggaatttggaccttctcacaagctgaaggaacacagaaaaacagaaatgcaattttacaaatggggcaggggcccccttcagtcaccatagccatgagtccctctctccctcctccctccttaaacccaaacccagaaccccaaagcctcagagcaccccagtaactccaagtccccgttccgctccagtctaggggtcaaagatgacagcctcaggtagaggatgtcaaagacctcagcgagagagagagggccacatggcggcgggggtgagggtctgcgaatccctcccccaaccccaggactcttgcaaacgctcctagctccagcattaacccggccggggcagaggtgggggttcatgacagtagcgccccctctgggagatgccccaaactcggagagcgcccagaggcggagagcaggagaggagggcacgtgacccccaccccggggaccaatcagcgcccgcgggagggggccacactcggcgccccccacccatcccggcgcgcttggagatagacgttttctttgtccttttgtcagctcttgggggcccccgaacccccaggcccccactgcagcgggggggatccggaccggccggccctcccctccaacaccactgcgacccctgccccgcggcctggacccgcgactcgtcctgttctgggctggacaggaggccggagaggactcgggcgcccaaggtgcggcggccggacgcgaagtggggcggaggggcctcccagtgccaggacccccacaccagccccgggtcgcctcgacttggctctcaggaccccgccccccaacgccacccccaacccccgaccaacaggccccctgcctgccccgaaccccccacctgggccccaatccagctccccagcggcgcagccgcgagcctcattattgtgtcttctccgggcccccccaggacaaaatctccacccgctgcggtgccgacagaacccccaacctagctgcacatacaggcccccagtcaacaatccaagcgccccccccacgttgcggtgccattagacacccccataatggaggctcagggagcgccccaggccaaaatccagcccctccaaagcgatgccaccggacccccaccggatccctccatacggccagcgaccccctctccaatccggtcccctccccagttgtgtggctgagagattccccccctcgttctagcgctccccaaaccccctccctggctccaaatccgtcccctcccagtggcagggcccgcaggccccccagtcctagcgcctgacctggccaccccagccagcctttcggtccccccagctgcgtgccgacagacgcccccatccccgcgcctcccccaaccccctccgcagacgccccggggcgcttacctcggagccgcggccgccgcgagtgcgcgggcgggaggcgcgagggcgggagggcgcgggctgggggggtccgtgcgcgcacctgtcccggccgggccgctcagcccggcatccccggctggggaggggggctgggggcgcgcgctctccccgcccccgggcccacggcgctgcgctgggggagggggctcagccccggccccccgcgcgctggcgtcggctccggggggggcgctgcgcggcggccggaccgggggcgcgccgcggccgcatctcctccgcccgccgcggccgccgctgcgactcgcggctctgccacctccgccccccctttccagcaaccccccacctccccaaagccgggctggagccgcgcaaaacccggcccggagcaaccgcggcgcggagcggagggcggagccggtgggtggcgtttgggtgagttgtgggggaggcccaagggggtcaccctgctttggtccaggtggtggacttattaattgagccgccccaacttcctctcctggtcccctctgttcaaactcgcatccccaggatccagccccaatcacacccagcccatggggtcaatgaggctgtcaggaaccctacggtctgggtggcccccttcatagacgagatcatttcttcaatccacaagtattccatttagcaacattcactcgacacttcaggaaactgaggcacagggaggtcttgtccaaggtcacccagttagagagcgtcagggggttttcgacctgagcaaaccggctgcagagatctccatggttcacgactcccggacctgcccctctgtcgccagcgccctgtgggacgtggcccagaaaggagtttttcgaggactgcaggttcccccatgaatttgagaccccaggacagagcctagaggtttcagagaccttcctgtaaccctcctgacccttcgaatgaattcaggacagcaggggctgctctccatgcctcagtgcccctccctgtccaaagtacctccccatgtggatgtgatcctgtacgtctcccccactggactgagtgctgtcctggtcgctctggcctctctccatacagtagatgctctgtaaacacttattttttcttgtcttttctgtttttcttatctttttctttctttctttgagatggagtcttgctctgtcacccaggctacagtgcagtggcatgatcttgactcagtgcagcctccgcctcccgggttcaagcagttctcctgcctcagcctcctaagtagctgggattacaggcaactgccaccatgcctggctaatttttgtatttttagtagagatgggct[136 bp omitted]taatagagaaatgggggagagagaggatagatgatttttttaaaaattgttattattatttgtagagaccggggcttgctacattgcccaggctggtcttgaactactggcctcaagcgatcctcccaccttggcctcccaaagtgctgggattataggcatgagccactgagaccagccaacactttgttgttatgtagcttgtgacttttcttgcacacttactgagtgctggggccactatgccccatccctggctccgtgccatccagggggtccagacaggttgtgcactggcttccagcagccactcagtggggactgggtatcaggacttgaaccccgctccccaggccacccacggcaatctgcaggctccctggcacccatggagacagcccaggtcttccagttcctgggcatgttcccagggccatcctggtgaccacaaacctccgggagcagccaggccttcctgcccgtggttttgcccttcccgccttccggccgccccagcatcccaggcaaatcagccaaggcacctgctggtgtccagcccccaccccgccccgtgtcctgcccgctgggggccactgaggcctgctccacaagggagggggccgagccccagctccaaggcttggggtctagaatctgcgtcctcccacctacactcccttccctgcgctgtgcccagcccctggcatcccctccctcccctgccttcttggctgtgcccagctgggtacttctgcaccctagtcattcagcaaacatttattgagcacctactgtgtaccagatactggactgagctgtcaacaagacaaatctgccctgtgccttttgtctagcctggggatacagaaaccagtgggcacagaactgcaggctgagacagactggctggaggtccaggaggacctcgaggaggtggcatggaggccttagagggaccatagatccaagcaggggggtgggggtaggggtgtgcggggagggcgttctaggcagagagacctcggggacaaaggccttgagggaggccccacccccaccggtggctcagctgccacccaggcttctgcgaccatgaatgggtctttcatgtcctggaccggggcaaggtcaggccgggcctctccctcctcccgcccagggctcctggctgtctgagccctgacctggaggacagtggcaggatgggccagggaggcccagggaggggcagggcatcgcccgaggtcaccagagccagcagcgccctcccagccgtgggattctgagcaaagccccgccccgctgggcctcagtttccccggcctgggcgggcgcgttggcagcgcagcgctcccgtcctgctccgaccgggtggattccagtgcgggttttgcgggcgcccgcggccaccgacaccttcttcccagtgcggcccgggctgcggccccgggtccgaggaggcccggggagacccggaggaggtcagaaggccttcagggtccccgggatggggtgaggctgagctcggccccttactgccggcgcctgccaggaagggaagccccgccccaatgcctgcgcgcccccatcaggaccactagcctcgtcgccccgctgtgtgactcccgggggtccctggccctctctgggccgagctgtagtcaggctcacgggcagccgctcagagaggtcgcctgggtcccatcccttccccaaatggccccccgcctcagtttccccggccaggtgcaggctctctttaaccccaggttggggggtcctcgctgctaggttgcaccccgggtctccgctcaggccagggaatcccctgggggctccgaacgggcagctccgattggctggggccacgtgtgacgtcagagcctccccaacgccccctcccctagaggcaagtgggggcggtcgcggccggggaggggtcccgggtccgagcggattcggggtgtccccccagctcaagtcggcagctgggccgcgcagacgcgattctcctcggacagatttttccctcgtcccaaatccccctccggccccccccagaacggcagctgctcaggcggcagatgcgccggctaaatccgcccagctggtcctccgcggagctaaccgcctggagccccggggctgggggagtgctggccgcatggtcctgacccttcctcgctccctgttctttgacccctgactcttcgcggaaaggggccgggattctgttgaggacactttctcaacctccagttccctcctggagctgctgagaggatttgggggagtctggcgcccagagagggtggagccctttccaaaaaccacacagcatccctgggcgtgctgtccaaaatatgccctgtattgcgcatatattaataattatgatgatgacttaacatattaggcctctgctatatgcacccccacgattctaggactattatgctattactccattttcaaaggtggaaactgagacccagagagccgtgacttgactgatcccacagccaggaaatggtggagcctggatttgaaccccagcttttaagaagaaggtgccactgtcctggaagaactctcaggacagcattagtgtctcagggatccccctaatcggaggggccttaaggcaagtgagtgtgacctggggtgagtgagtggggtctcttagacctcttccctgccccctgcctggtgcccctgagcctgacacagactgcctccctgccttgctttttcagcctaatcatgattgtcactgaagatccaggagggcttcctggaggaggaggcagctccattctgaaatgccaagggtacagctttattgggacagccagtgtctctgaatatgtaggttttgcacagagcttgtactgccccagggcctgtacactgcctgtcccctctgccttgtgcactctttccctagatgtccaaatggctcctttcctcacctaccccaaatctcaattccagtgtttccccagcctcccctcatttcagtaatcactctgcagtgagctaggattgcgccactgcactccagcttggataagagaacaagaccctgtctcttaactaaatacataaataaaaataattcccctcttcatccctctttaccctgttttgatggttttgttcaacttttcaccaataggactttctcttatgcatttactcgtttctcttccaatccctccccaagacagtcaagttcccaagtctgtccaggactccactgtgtcacgaggcttaaaacagagccaagcacacagtaagcactcaacacatgtggtgaatgaatgaacgaatgaaggagtgaatgagtgggagtctgagatttcaacagggcttgccttcattgtatcaaaggggaaactgaggcccattgatcagagagtgagaccagagtcacttatttttctctttagcaaaataggacataatggtgaccacctccccagtatgcagcaggggtatccagggaaataataatgtcggaagcacttattaagcacctactgtgtgcactgcacagctccaggtgctttgcgcatttcgaatggagacaaggactccaacccagaacccaggacgcctggtcccatggtcagcctgagttccctacacctcactgcttccctctcattgagagaggggttatatatgcaagctccgggtgcacaggagaccttcagccagggaggcagtggtccccactgtgtctgaggccccctctgcagccccgcagaccctgggcccgaggttcaggctgtgtgtctggctggagctaacagcaccatgcctgcacgcaggaaacattaaattagagacggaagcagcaggacctgcgcctgatttataaattgaaattagagcaattacaaggcttcctccttctcagaaactgagaaatcccccagaaaggcccatgtgtgtcctgggttggcccagaaccccctcccccaaggcatcatctgcatatgatgtagtgacaaatgaggcagtggcatcctggtctccaaaacaaggaatttgtgggtggagcgagggtgtccagggaccttcaacctccctggggtctgtccttgggtatagataggaaactgaggcatgggaggtgagtgtcatttgggcaggggcaggtgtcacattctccgctttcaaaatctcccctctggcctggtgcggtggctcatgcctgtaatcctagcactttgggaggccaaggagggcggattgcccgagctcaggaattcgagaccagccagggtaacagcaaaagctcatctctactaaaaacacaaaaaatcagccgggtgtggtggtgcatgcctgtaattccaactactcgggaggctgaggcaagagaatcccttgaacccgggagacggaggtttcagtgagccgagatgatcgtgccactgcactccagcctgggaaacaaagcaagactctatctcaaaaaataaaaaaataaaaaataaatctcccttcccctagatctcccttcccctaggcttcccattccagcctagtgagcacacccagctcactcctgcctcggggccttggcacttgctgttcccactgcctggaagctgttccccaccaacgttcccttctctgagaggccttccctgatcatcccaagttggagaggatggctcttttccacccactgttttcttttctctaaaatcagtgatgggatagtgagctgcctgtcaagagaggcaagcaagcagacagtggagtggatgtgatctctgcagctcacacactggcgtccatcccctagctttaccactcaccagctgtgaacaagttgtttaacatgagaacattccaaaagatgccggggcctaggacggacgccatggctcatgcctgtaatcccagcactttgggaggctgaggtgggtggatcgcctgaggtcaggagtttgagaccagcctggccaacatggtgaaaccctgtctctactaaaaaatatataaaaattagctggacgtggtggtgcgtgcctgtaatcccatctacttgggaggctgaggcacgagaatggcttgaacctgggaggcagatgttgcactgagccgagatcatgccgctgtactccagcctgggcgatagagcgagactctgtccccccattaaaaaaaaaaaatgctggagcctgtcacatagttggtgcttaataaagataagtagtcttctccatgggaggtcctgagattcttgtttcttcctcttggtgatttttcctaatcttcctcctctcttggaagctgtgggaaggagctttgatgccgttacatttgcgtagggcattgtcaaaagagaaataaaaacagatgaccagaacagatcctggcacccgtgttcacagcagcaaaagggcagaagcaaaccgactgccaatgagcagatacatggatcaacataagggggtccatggacacggtgaaatatgactcagccatcacaggcttcagatgtggatgcatcttgaggacgtcagactcagtgaagtaagccagacgcagaaggccaaatccagtgtggttccactcctagaaggtccctggagtcatcagattcatagagacagaaagtagatggggagtgccagggactggggagtgggtggggagtgagtgtttcttggggacagtttcagattgggaaaaggagaaagttccggagaggatggcggtgatggttgcacaaccacgtgaatgtgcttaatgccgctgaactgtgcacttagaaattgttaaaatgctgatttttctgtgatgtgtgttttaccacattttttctttcttcttttttgagacggagtctcgctctgtcccccaggctggagtgcagtggcacgatctcggctcactgcaaactccgcctcccgggttcacgccattctcctgcctcagtctcctgagtagctgggactacaggcgcccgccactgcgcctggctaattttttgtatttttagtggagacagggtttcaccgtgttagccaggatagtctcgatctcttgacctcgtgatccgcccccctcagcctcccaaagtgctgggattacaggagtgagccaccgcgcctggcccacattttttctttaaagatagaaagaaaaccagaactggtatgcagaaagggtggcaag[143 bp omitted]gaaaccccgtctatactaaaaatacaaaaattagccgggtgtggtggtgggagcctgtaatcccaggtactcgggaggctgaggcaggagaatcacttgaacccgggaggtggaggttgcagtgagccgagagactccgtctcaaaaaaacaaaacaacaaaaaattagccagacatggtggcaggtgcctgtaatcccagctacttgggaggcagaagtaggagaatcacttcaatccaggaggcagagattgcagtgagtcaagatcacgccattgcattccggcctgggcagcagaatgagactctgcctcaaaaataaataaatacataaataaaaataatagcaacagcagaaacaggcagtgacggtggagggtgtgtgtgtgaatgacctcagctagtggcagttcgtcattgccactaaggccagccacacaggtgacactgacagtgtgcagagaggccatcaagggtgtcgagctcagatcacacccttccctccccaccagggggcctgctcagcgtccactacaaaacctccgacaccttcaggaagcagaactgagcctcgggggtcttgccccttgctggcctatttttcagctaactttattgagcacctactgtgtaccaggctctactaggcagtgctggggacacagtggctgagcaagacacaaatggaccctcatcttggcagagttcagagatcagaggcgaggattcactcattttattttagtttttagagatacagtctcactctgtggccctgggctggagcgtggtggcctgatcatagctcactgcagcctccaactcccaggctcaagggatcctcccacctcagcctccccagagtgctgggattgcaggcatgagccaccacgcctggcctagcagaaagattttaaacaggtagtcagggaaggcttcactgaggaggtgatatgtgagcagagacttgaagaagagggggtagaaaatcatgcagcggctgggcaaagtggctcatgcctataatcccaacactttgggaacctgaggcgggcagatcacttgaggtcaggagttcaaggccagcctggccaacatggtaaaaccctgtctctactaaaaatacaaaaattagccaggcgtcatggcacacacctgtaatcccagctactcaggaggctgaggcaggagaatcacttgaacctgggaggcggaggttgcagtgagcagagatcatatgtctaaaatcttattgccagcctgggcaacagagctgtctcaataaataaataaaaaatcatgcaggtacctagggaaagagtgtagtaggtgggcgggcacagccctgtgcaaaggtcctggggcaggaccgtgcctggcatgttggaggaacaacgaggaggcccgtgtggctggaacagagtgaggaatgggaggaagggagggcaggcaggtaagggggcttttggaattaattcagctcctctagggcgccaagctctaccctgcctcagggcctttgcacgggctgttctctcctcctggccttctgcctccctctccccccaggttgacctggtcaacccgtcctccttcattcccaaggtaaatgtctcagtttgaatcccacacacccgactgggagcccaaggaccgggcccagaactgtccaggccaaggtgatgtccagcactgcccaacatagagttggcatacagtaggcactcaataagtgtctggtaaggttcaggagattgtcagggaagcctccctgcccctgccctgcaatgatggtgaggctggtggccctcccttatctggactcagttttcccttccagaagattccaaaggctgcgtccaggatggagatgggaaggtcgctcctctactccaaaagcatggtgggggacaggtccctctgtagtccgtccccagcctgctctgcgactgcagggggaacctgccttgccctctctcctcacccctccaggcctctctcctttcgtctccgtctctaggtccatctcaccgcctgcttcctcatctctcaatcttgctctctcactgtctctgtctcagtctttcccctgggtctccagttttctatccccccatccccgtccccaccccagggtctagagatctgctcatctttgggcaaagcctggaggccaggaaggaggagggggtaggggaagttccagatgctcctcaaccctcacccgcctaagtgtgggtgggtccccaaggaacctgggctgagacagctctaccccctccccagcttcttcggggatccccaaggccagtggggaatttctagggagaaataaacatccgtatcatttacataaaatctgcatcaattagcatatcgattacaagagtctacagaaccaggcaagccgtttgcaaggaaaatagtaactttaatgacaaatgaggccagcagcttctccatggaagcgacttgtcacacttccaccctgctttacaggtgggaaaaccgtggaggtgagttctagacagagagagggagataatctaggtgggcagggtctctgccctctccaggcatttgcagatagataatgaggaaacaagtaattggctaaaatgatttcagattattataaggaccaggaagaaaagaaatgaaggaggccaggtgcggtggtggctcacgcctgttatcccagcacttagggaggccaaggcgggtggatcacctgaggtcaggagttcgagaccagcctggccaacatggcaaaaccccgactctattaaaaatacaaaaaattagccaggcatggtggcatgcacctgtaatcccagctacttgggagactgaggcaggagaatcatttgaacctgggatatggaggctgcagtgagccaaggtcatgccactgcactccagcctgggcagcagtgagactccgtctcaaaaataaaataaaataaaaaataaaacaaaattgccaggcacggtggcatgtgcctgtggtacccgctgctcaggaagctgaggcaggaggattgcttgagccagggaggttgaggctgcagtgagctgtagtgacaccactgcactccagcctggatgacagagcgagaccctgtctcaaaaaaaaaaaaaaaaaggaaaatttaaaaagagaaaatgaagggcagcgattctctgggggcatcagggagggcctctctgaggaggtgacattgagctgagacctgaaggaggagtaggggccagatggggaggaaatatatatatatgaagagcgaagaatgaaggaggactccaaactctttcccttccatccccctcgccacctgttcttcaccctctccaatcattcccatcatcctttgggctcagctcatatcatctcctccaggaagctctccttgactgccccaactaagtcagccttgttcctgccagcttcccagagcccagcacagggcagaagccctacacgttccccaggagatggaaagaagattccctggttctggggactgaagattttgacaagctggtaatgcgcacctctggtcagaaccacgtctgcagaggaaagacccagccatatccctcttttctcagctgcctggtaggggaggagagggcagaggaggttgagtttcttggggaaaactggggtgccatcagctgttcccctccactgccttcctgtagggggtccctggggttgagggcttcagcccagctcctggggtgggaacccagccaggaaagatctggagtgggagagaaggaagactgggaggggccaggaaagtgtctatttttcctcctgcagctgtatttatagattccctttgatgtcccagcgttgggctgacctggttcttggctgcatcaggagaaagacaggttctcagagttgtttctagaagttgggcgggcggtgggagggtgggtcctcaaatgaggagagctaggtatgcaacaactggacccctgagcttggagggggtctgggatggggggaggcaaggagctggcctcagtttccctgtttgcaaaatggggatttacatgtctcttccaggttctgttcagttaaagagaagagaaacttaaaaaaaaaaaaaagacatatatagttctcaaaaagttgagactgggcaacatagcaagacccctatctctacaaaaaaaattttgaaaaaaattaacagggcatggtggtgcttgcttttagtcccagctactcgggaggctgaggcaggaggcttgcttgagcccaggaattggaggttgcagtgagctatgattgcaccactgcattctagcctgggcaacagagcaaggccccgtctctaaaaataaagaaagaaagaaaagaaatgctgaaaacttgagtcacccaaacgtcaagtaagcacatgtccatgattcattagctcattactcagggaaccaataaaatgttgaggctggttctaagagtatttgaggaactaggtatctacggagatttttttttttttttgagatggagttttactcttgttgccaggctggagtgcaatggcgcggtctcagctcactgcaacctccgcctccctggttcaagcaattctcctgcctcagcctcccaagtagctgggattacaggcacccaccaccatgcctggctaattttttgtatttttattagagatggggtttcaccgtgttggccaggctggtctggaactcctgacctcaggtgatctgcccacctcagcctcctaaagtgctgggattacaggcgtgcgccaccacgcccaactaattttgtatatttagtagagatggggtttcaccatgttagccaggctgatctcgaactcctgacctcaggtaatctgcccacctcagtctcccaaagtgccgggattacaggcatgagccaccgcgcccagaccgagattgtttttttttttaaggtggaatgttagattaagatcaggctagatacaaacgaattaatggtctatatttcagtaaagccctagttggggttctcttttctaccagacagacagaaatgatcaagttaactgtaacttcgcagggcctgagctctcatcacatggccaagtcatagacaagcacatgctcccacagcaaggttccaacagaacttcctgcagtgaaagaggcgtttgaaatctgtgctaacacagtagtcagcagccatgtggctattcagcgcttacatggtgacttgaggctgagtgcagtggctcacggctgtaattcctgcactttcagaggccgaggtgggttgggggatggcttgagcccaggagtttgaaaccagcctgggcaacatagcgagaagctgtctctaccaaaaaaaaaataaaaattagctgggcgtggtggtgtgggtctgtagtcctagctacttggaggctaaggtgggaggattgcttgagcccaggaggtcgaggctgcagtgagctatgatcccaccactgcactccaggctgggtgacagagcgagaccgtgtctcaaacacacaaacaaaaaacagtgacttcagcaagtgaggaattgaatttttaattttatttcattttaattgacaatttaatttatttttgagataagctggagcacagcggcgcaatttcggctcactgcagcctccatttcccgggttcaagcgattctcctgactcaacctcccaagtagctgggattacaggtgccggccaccacgcttggctagttttttttttttgaaatggagtctcactctgttgccaggctggagtgcagtggtgcaatctcggctcactgcaaactctgcttcccgggttgaagtgattctcatgcctcagcctcccaagtagctgaaactacaggtgcacaccaccacatccagctaatttttgtatttttagtagagacgggttttgacatgttggccaggcgggtctcgaactcttgaccttaagtaatccacctgcctcagcctcccaaagtgttgggattacaggcatgagccaccgcgcccagagattgtgattattattgactggattattttgtgctgtaaattgggtaacctccgtcttcataccttagttttcacatccgtgaaatggggtcagtaatacttgggaacacagagagctgttacaataatagagtttattcatgaaaagactttttttattttttctttttgagatggagttttgctcttgtcacccaggctggagtgcagtggcgtgatctcagctcaccgcaacctctgtctcccaggttcaagcgattctcctgcctcagcctctcgaatagctgggattacagtcatgcacaaccatgcctggctattttttgtatttttagtagagacagggttttgccatgttggccaggctcgtctcgaactcctgacctcaggtgatccaccctcctcagcctcccaaagtgctgggattaccggcatgagccaccacacctggtctaattttttttttgaaacagggtctcctgtcgcccaggctggagtgcagtggcacaatcatggctttctgcagcctcaaactcctgggcttaaaccaacctccagtgtcagcctcttgagtagctgggactacaagcacgtgtcatcatgtctggctaaaatttttattttattttatttttgtagagacagggtttcgtcatgtttcccaggctgatctggaactcctggcctcatgtgatcctcctgccttgcctcccaaagttttacagaattacaaagaattcacgaattctttgtaatttgtaaaaaaaatttacaaagaattacaggcctgagccaccacatcatcttgtaagtattattattggtggagatgaccagagatgttggctaaatttcccaaggccacacagccgggcaaggccagagctcggagttgaagcaaggtctttccagtgaaggctgggagcagtgcccgggctctctatggggtcaagagggatggcatcgggcctctgaggacccggcgcccaggctccagggttaagcctgtgtggcagctgaacttccgcggacctgtccctctaaaatccctgggaagcaaggcatcaggcgttccggaacaggcgcctgctcctgtcgggctggcgcacacttggagagacagctggcaggggactgacgggccagggaggaggggcctgggggggggagggggccttggccaggagaagaggtcaggagctgctccaacccacccacctccagatgggagccaagcgcctcctctttcgcattctctaacgcctctcaattccttcatccacttttgacaaatattattcaacacctactatatgccaggtgccctcctgaaccctttagttgagtaatatgtcaggagtcccctttacagatgtggagatcaggctcagaaagcactggccacttgtcctggacaaacagcaagaaaatggctaagctgggattgccagccagggctcttggtcctgactcagggcctttgcactggctctttcctctgcccggagcacaggcgtgagcctgccccgccaatggggtttttttttgttgtttgtttttttgttttttttttttttgagacggagtctcactctgtctcaggctggagtgcggtggtgcgatcttggctcactgcaacctccacctcccgggttcaagcgattctcctgcctcagcctcccgagtagctgggattacaggcgcccgccaccaagcccgggtaatttttgtatttttagtagagacgagggttcaccatgttggccaggctggtctcgaactcctgaccttgtgatccgccggcctcggcttcctaaagtgctgggattaccggcgtgagccaccgtgcccggcagctaatggatttctttagccctcaggttagatcacacgtcctgaggaaagccttcagggagccatcataaactcccgtgcgccccccagctaggccctctgacccccatcaccgcaatgaccacctcccccactgaactgcgaaccgcactgggggcgaggccggctctgtcggggtcacgtatccctgtatccctggcccctagcacaggtttgcagagctcacgactgtaggtactagacgctctatatacgaatgaaaggatgaagggatgaagtcagaatttctgcccatcgcgcacttccatgctgggggaaccccagctcaaggatgaggaatcaggtgctgaggtccacgctgggatctgaaggggtcttcatggaggacggtccttctggcagggtctctgctcaggggagcccagcccgggactggtgtgccgggcagggggtctctgtagggagagtccctgccgaaggggctggaactgtgcggggcgcccctgaatggtcgaacctggagagctttgttgctcagatgaggaagggccagggaggccaccctggaccaaagggtcacgtttctattcttcctggcccagaatggacagccccagaagaagctgacagtcggggtgcgccccgcaaggggaggagctgagagaggggcggggctgagagaggagggggctgaggaaggagagggggctgagagaggggaggggcttagaggggaggggtgagggaggagaaggggccgagagggggagacgttcagaggggaggggtgagggaggagaggggggctgagagacgagaggggctgagagaagagagggggccgagagaggacggggttgagagaggggaggggctgaaagtggtaaagctgagaggagaggggcggggctgagaagaaggggcgaggcgggaaggggcagggctgagagaaaatgggtggggctgagaggagaggggcggggctcggaggcggggggcgttgtggggcagggctgagtggggcggggttgagaggagaggaagctgaggttggggaggggcgtggagaggggagggggggctcttcgaggggcgggaacagggctcaaggaggctgagtggggcagagggggccgcctaagttctgtcctcccctggggccccaggacacagggtcaggagtgtatcaagtcaccgggtttctgaccatccagaaacctgaccgcgtgcgtccccggggctcggggtcgcccctatcccatgctctacctccctccctctcctcgggccctcctggctccctctgacctccccaccgccagtcagctgtgtctgtatttagagcggtgcaggcctgtgtcactttacttccgaaagggattttgcatctcttagtgctgccttcagaacccccaacacctgttgcggcgcgagcccgtgccacggggagggggtggtctcgcttctggagccactgtgggggaggaggctcagctgcctcccctccccgagaaccttctccctttgtgcaccccctcccttctgagccccttctctaagtccccatgtccccctcccgtcccggagcccccccttctctaagtccccccggccctgccccctgccctctcggagccccctctctgcacgccaactcagagccgcctcgttcccaggctccccaaggccccgagccctgcctgtccccctcctcccctggcctgtccattgtcctggtgagggggtcctggaggctgggcgggccggggtctgcatgcagggggcgggagtcgcctgctacccagtcgtctctgggcaacgctggcaaacctcacgcctagacacagaggctgcgctgttctctgggaggggacagggggcacaaggtgactggggagatgctgggggtgacggctgtggatatgagttttcaggcagggggtgccagaggcagctccaactgctccaggtgggagaaaggttcgagagcgtggccatgggaaacgttgtccccctgctgtccccacggcgacctccaactcactcgacatccttccttcctctgcaggccctcctgctctgccccatcccacagtggggtcttccatgcctgctctgatatgttcatcatcacagccttcccagttggattttgcaattaaacccactttacagatgagaaaaccgaggcccagagagcatttggtgattgaagcagtgaggagaccacacttttggggctatggcccaggacccgagccccaactctcctgttttctctccacatgacctaacagcttctctgagcctcagtttactcatctgtaccgtgggcagatggtggtacccatttcctgggctgtttttactgtgtggggaataagatgcttaaacagtctagggttcaaacttgggtgccagttaccagctgtgcaactggtcaggccatgttgccgctctgtgcctcagtttccccgtcaacaaaatggggtctataatagcatctacttcataacgtggctgtgacagtgaaagttaattctaggccgggcgcggtggctcacgcctgtaatcccagcaatttgtgaggccaaagtaggcaggtcacttgaggttaggagttcaagaccagcctggccaacatggtgaaaccctgtctctattaaaaatacaaaaattagctgggtgtggtggcggccacctgtaatcccagctactcaggaggctaaggcaagagaattgctcgaacctgaaaggcagaggttacggtgagcgaaactctgtccaaaaaaaaaaaaaaaaaaaaaaattaattctagtacatactggcttgtagaaaaccctttataaatgttattgttactatattttttccttctgagtttgtgccttttttcttttttggtgatagggtctccctctgtcactcaggctggagtgcaatagagtggtctcagctcactgcagcctccaactctcaggctcaagttatcctcctgcctcagcctcccgagtaggtgggactacagatgtgcgccgccacgcctggctgttttatttttttgtagagacagggtctcgcaatgttgcccaggctggtctcgaactcaggcttaggtgatcctcccgcttcggcctctgaaaatgctgggattccaggcatgagcctccgcacctggcttgagtttgtgctttctatgaggttcagagaggcttgtgtgtggggaggtcatcgtcccaggcccttccaggccctcaggcttggagttagggattgagggtgtgagatggttccctggggtaactctatctgggaaccagtccccgtgcctgttgagtgatatagtggattccactgccacaccttctgtctcccctgcctgaactgtgtagacgacccagggcccctgatggtgaggactctgagtctgcccctgtcagggtaattgccagagagtgcacagagcaaagcctccatagctcccaccctggactgtgactccctgggtgcagagggggtgcagaccctgttttctgcacataaacaggtgcacctgttgggtcctcacttgaggctgctgggccagcagccccctagctctcccactacaagcagaggggagaaggggcatagctgccccctccgcctgccacagcagtcaccaaggttcctgccagctgctcccttctcagagttcactgggcatcagcctgtcaggcactcacagccgtgccctacctcctggggttaccataaacatacattaacagccccatccagcacttattgaacccgatatgcaacatgtgtaattgcatgcaatcccccccaacagtccccaaggaggcaggtgctattatcagcctcattttatagatgggaaacaggctcagagaggttctgtcacttggccaaggtcacacagcagggaagtcacagagcagggattcaaactccaggctgcattctttatttttttattttttattttttctgagacagggtcttactctgttgcccaggctgtagtgcagtggctcgatctcggcttactgcaacctctgtgtcccgggctcaggtgatcttcccacctcagcctcctgagcagctgggactacaggtttgcaccaccacacctggctaacttttgcgtttttttgtagagacagggtttctccatgttgcccaggctggtcttgaactcctgggctcaagcaatcctcccaccttggcctcccaaagtgttgggattacaggtgtgagccaccgcacccagcccaggctgcactcttaaccaccaccctttgctgtctgtcacaacaaataacaactgtgtgtggcctgaggccactgtgcaaaacttggaggtctgtgctctcatcagcctcactgtgcagaggaggaaagcaagggccagagacagggagggcctggctcaagggcacaaagcaggcagggggaggaataaagatgagcataagggttagcctgcctctgagtgaatgagtgcatgaggtagggagggagtgagggtgg[137 bp omitted]caaggtgaaacctcgtctctactaaaaatacaaaaattagccaggcatggtggtgggcacctgtaatcccagctacctgggaggctgaggcaggagaatcacttgaacccaggaggcagagctttcagtgagccgagaccgtgccactgcactccagcctggcagcctgggtgacagagtgagactccatctcaaaaaaaaaaaaaaaaaaaggtggtgaatggatgggtgattagatagatggatgtatggatgagtgaataaatgaatggatggattatggatggattatggatgaatggatgagcgggtggatggatggatggatggatggatgaatagagaggtgggtgggcaggttggtcagtaaatggatgtatggatttgtgaaatgatagttgtatggacgatggatggatggatggatgaacagatgaatgtatgcattatgggtgagcggactgataaatgggtgcaggtgtggattacggatggatagatggatggatggatgaatagagaggtaggtgggtaggtaggtgggtaagtggatgtatgtatttgcgagaggatggatgtatggattatggatggatggatgaacaggtgaatgtatggattgtaggtgggtggattgataaatgggtgcaggtatgaattatagatggatgaatggatgtatggatgagtggatggatgaatggattatggatggatggatgaatgggtaggtggatagatggatgagtgaatggatgggagggcggatggttatatggattatgggtggattaatgggtgggttagtggataaatatatggattatggatggatggatggatgagtaaatggatgaatggatgggtggatagatggatgtgtgggtggatggatggatgggtgagtgcatggatatatggattatggatggatggatttggatagatggatgagtggatgggtgggtggatggatggatggatggatggatggatgggagtattgatgggtgggtggatggatggattgatgggagggtggatggatgggtgagtggatggatatatggattatggatggatagttggatagacagatgagtagatggatggatgggtagattgatgggtgggtagatggatggatggattgatgggtggatggatggatgggtgagtggatggatatatggattatagatggatggttggatagatagatgagtagatggatgagtggatggatatatggattatagatggatggttggatagatggatgagtagatggatggatgggtgagtggatggatggatgggtgagtggatggatatatggattatggatggatggatctggatagatggatgagtggatgggcgggtggatggatggatggatgggaggattgatgggtgggtggatggatggatggattgatgggaggatggatggatgggtgagtggatggatatatggattatagatggatggttggatagatagatgagtagatggatgggtggatgggtgagtggatggatatatggattatagatggatggttggatagatggatgagtagatggatggatggatggatggatgggtagattgatgggtgggtggatggatggatgggtgggtgtgtggatggatatatggattattggtgggtggatggatggatgagttagtgggtgggtatatggattactggtggatgtattaatgggtgagtgaatggatatatggattactggtggatggatggatggattgtttttcacccttcctctgtagggagctctaagcttggttcacacagcagatggggtgagagggtggtgggtgggatagacactactggagtcagttccaagtaggtagagaaggattctggaatcaattccagggcagcatctaagagagcatccagccattcactccttcagcaaacacgtattgagcacctgctgcatgccaggtgctcttctaggcactgggcgtctgtccggcagggaacagagcagacaaaatccctctcctgtggggctgacaacttcaggagggcgtggggggtgtgagagccccattggagcaggtttaggagggaacaggaaatggggaagtggagacagcaagtgttgatggg[142 bp omitted]tctactaaaaatacaaaaattagctgggcgtggtggcatatgcctgtaatcccagctactcaggaggctgaggcaggagaattgcttgaactcgggaggtgaaggttgcagtgagctgagatcacgccactgcactccagcttgggcaacagagtgagactctgtctcaaaacaaacaaacaaaaaatcattaccctaatgcgggttattacaagttcctgatgcttcagacaattctccaatggccccagagtctgtcgtgccctttcccacaaggttaaaagtgacagcaggcctgtaatcccagcattttgggaggcc[225 bp omitted]tccgtctcaaaaaaacgaaaaacaaaacaaaaccaaacaaaaaaagtgacagcaggcagccagggcctcacagcccaaggtctagtcccaagggtctccatttagaagttgttggtttttattttaatgtgttggtttgaaagtcctggaggctgcaggttcttgcatctcagccctagaggagtaatgaagcttctccagggagaatgagaagctggaaacagcttcaagaaatcgggttactgaggcagggacaggcctgatgaaggctgggaggtgggagacccctgtctggcctatcccacctgccagtttatagattatgtgtgacagggggcagcacccaggagccgggctgaatcctttcagctaatggacatttatggcgtgcacagcaggtgcaaaggctctggggccacgtggagcatggactgttacagaaatggttacaggttcctgaattagcccattttcttttcgtctcagagcctcatttaccccatctgtgtaatggacataagagaacctatctttctaagttgtgtgcatatgttttcaccacgttcagactgtgtgtgtgtgtgtgtgtgttacctgtgtcctccccaaaacactttaacattcactcgtttttttccttggagacagggtctctctgtcacccaggttggattacagtggcacaatcacagctcactgcagcattgaactcttgggctcaagcaatcctcctgcctcagcctcctgggtagctaggaccacaggcatgtgccaccatgcctagctaatttttaatttttttttttagaggtggggtcttgtggtcaggcgtggtggctcgtgcctgtaatcccagcactttgggaagctgaggtgggcagatcacttgaggtcaggagttcgagaccagtctggacaacatggtaaaacctgtaatcccagctactcaggaggctgaggcaggagaatcacttgaacccaggaggctgaggttgcaatgagctgagatcctgccactgcaatcactccagcctgggcagcaaagcgacactcttttttttttttttaaagatggaatttcgctcttgtggcccaggctggagtgcaatggcacgatctcggctcactgcaacctccgcctcctgggttcaagcgattctcctggcttcaagtgattctcctggctcagcctcctgggtagctgggactatagacgcccgccaccacgcccggctaatttttgtattttcagtagaggcggggttt[141 bp omitted]ataattttaaaaagttagatggggtcttgctattgcccgggcttgtcatgaactcctggccacaagcaatcctcccctctcagcctcccaaagtgctggaattacaggcgtgagccactgtgcccagccccaatgttcacttttttaaaattaggtttactctctctcaccatttgaatgtcagctctacaaggacagcaatctgcgtgttctattcactactgaaactgcacagcctggcatacagtaggtgctcaatacttgtggaaatgcataagtgataacctccacagaacactaagtacaggctagagccgggcttcagcatttcctaggcatgcatttatttaattaccccaagaagccccgtgagaaaggtggtattagaggctgggcatggtggctcacacctataatcccagctatttgggaagctgaggtgggtggatcacctgaggtcaggagttcgagaccagcctggccaacatggcgaaaccccgtctctactaaaaattcagaaattagccaggtctggtggtcggtgcctgtaatcccagctacttgggaggctgaggcaggagaatcacttgaacccgggaggtggaggttgcagtaagctgagatcgcgccactgcactccagcctgggagacagcgagactcggtctcaaaaacaacaacaacaaaaaggtagtagtattaggatcccattttatagacgggaaaattgaggcatagagctgttagatttgagcccccccactcccctctcctccccccacccccgcccccccaccaccccgagtccagcccctgtgtgctaccacctctggctctggacctgtgggtttgtcaacacgtgttcttggcatgaccaggtgcaggaacatcacacataccaggagcttgcacgggtctggggtgggggccacatcagcctccggaacctgagcctgcagggcagcgcgtgccccagtcccgggggccacaggagggagcgcgtaggtagaggcggcgggtccaatctccacgccttgttccctctccgggagccggcttccctcccgcctgcctcggcctggacccggcccagctgctgacctcgggaactcgagtgcccccagggacgcagacaatcaattagaattggcagcgcctgcctaagtaaaaggcctgctttaatgaggaggctgtggctctgccgtgggcgcaggcgctgggctgagcccggcgcgggctggagctgaggggtcacgtggccaccagggcccacctgcctgtcacaattatgagtccccgtgtgtgagctcattatgtttatcattaggccagggctatttacagatcggggagagcagccccttgtcatgcaagccgcagacatttattgagcaccagctgtgtgctaggtcatgtgctgggttcgaggaaacagtagggacaagacgccctccagtgggggccaggggagacatcagggtgggcttcctggaggaggcaacacatacactgagattggaatgatgactcgaaattcg[144 bp omitted]caacatggtgaaaccccaaatctactaaaaatacaaaaattagctgggcgtggtagcgggtgcctgtgatcccaactactcgggaggctgaggcaggagaattgcttgaacccggaaggcggaggttgtggtgagccgagattgcgccattgcactccagtgtgggcaacagagcaaaactccatctcaaaaaaaagaaaaaagaatgagcgcagcctgggttgtggcggggggggctcctacctgtaatcccagtgctttgggaggctgaagtgggaggatcacttgaggccaggagttaaagaccaacctgggcaacatagtcagacccccatcacaaaaaaaataaaaaaattagccaggtgtggtggcgcacatctatagtccagctacttgggaggctgagatgggaggattgcttcagcccaggaggtcgaggctgtagtgagcaatgattgtgtctctgcactccagcctgggtggcagagtgagaccccatctcaaaacaaaaaattgaattagttcccgtgtacgggttgttcaaagcaagataacacagcaaaggaccatgaagcctgcagatgaatttcatctcgaggtcctgaatcaattacatctgcaaagaccctatttccaaaaaagctcatattctgaggttctgggtgtgtataatttttttttttcagacagggtctcactctgttgcccaggctggagtgcagtggtgtgatctcggctcactgcagcctttacctccccggttgacgtgattctcctgcctcagcctcctgagtagctaggattacaggcagctgccaccatgcccggctaatttttgtatttgtatttttattacttatgatctttttcctgagaccaagtctcactctgccacccaggctggagtgcagttgtgtgatcttggcttactgcaacctctgccttctgggttcaagcggttctcctgtctc[131 bp omitted]cctcggcctcccaaagtgctgagattattacaggtgtgagccaccgtgcccgacctatttatttatttatttttgagacgcagtctcgctcgtcacgaggctggggtgcagtggcgcgatcttggctcactgcaacctctgcctcctgggttcaaatgattcccctgcctcagccttctgagtagcttggactacagccgtgtgtcaccatgcctggctaatatatattttttttttttgtattttagtagagacaagattt[132 bp omitted]tttgagatggagtttcactcttgttgcctaggctggagtgcagtggcacaatctcagctcactgcaacctctgcctcccaggttcaagtgattcccctgcctc[134 bp omitted]catcctcccaa[160 bp omitted]gattctcctgcctc[184 bp omitted]agtgtatgtaatttttgaatttatttttgcaggcaggcactactcaacatggtacaatgtgtgcttgttcctatctgcctcctgctctggaatgtcaactccaggagggcagacttctgtctgtcttgaatgccacagtgtcccctgtacctcaaatactgtttggcacacagtaggcactcaatacgtgtttgtttattccgcaaacaactatgaagcacccactgtgttgttctcacacggaggtggagtttttcatgctccgaggacttggggcagagagaaggacaagtaggagccacggtgactgcgacttccttttttttttctgcagcctcaggtgccagcagcaataacacaggacctctaggcagaggaagggaagaggcgctgagggaggcagggcttctgcggcggggaggggggggcagagcccctggggatcaggccagggaggcgggagtcctgctggagtccctggggtccccagcagagaggctggctggctgccctgccctggcctggctgctttttctggcttggacgggaagggctgacaccgccagaggagggcagggtggaggcggggagggggcccgcacctggacccaggaagaggtgggggaaagaagtggagcctgggaaggggagacagaggaggtgaggagagaaagagagaaaccaagagagatagaaagagacccacacagagaagctgagctggagtcagacagataaaagacacggagagactcacgcagaaggtggcaaagacagaaacacagagagatggacagagacagtcagagataaagggagactcagagagacagaggagacccacagagatacagactcagagagatagagagacacagacctagagagagagagaacaacagagacagagatagaaagagatagtcagagataaaaggagactcagagagatggagaattagccgggcgtggtggcgggcgcctgtgatcccagctactcgggaggctgaggcaggagaatcgcttgaacccgggaggcagaggttgcagtgaaccgagattgcaccactgcactccagcctgggagacagagggagactgtccccccgccaaaaaagagagagagagagagagacaaagagacttagagagagagagagagggaaagaaagacagggataaaagtagattcaaagagacagagagaaaacaagagaaaggagaccaatagagatcaaaagaggtagtcagagataaaaagagactcagagagacctagagacagagaaagacagagacagagacttagaaagagaatggggaagaaacagagagatagaggcaggcgagaggctccctagcccatccccctccccaattttcctctctggggcacccctggggtctggggctctaaccctgtcctggtccccacccctccccctagctggtacttcagaccccctccacaaactggctgagtgcccccagtccctaactcagggtctcctcagctcagagctccggggctcagccctgagaccttctgggattcaggatccgaatgcccagtggagccagaatctgaatcccagaggcagggacaccattaatcctggaaagagggcaccccctccacccgggcctgagctgagagcggggaggctgtctatatgaagcccccacttcacacttcccacaggagagattcaccctgtttcacaggggaggaaactgaggcttggagaaagacgggattgtggagaggtacacgtttgttcatccagaaaatatgcactgagatgggcgcagtggctcatgcctgtaatcccaacactttgggagcccgaggtgggcagatcacctgaggtcaggagttcgagaccagcctgaccaacatgatgaaaccccgtctctacttaaaaatacaaaaattagccgggcgtggtggcgggcgcctgtaatcccagctactcaggaggctgagggaggaaaatcgcttgaacctgggaggcagaggttgcagtgagtggagatcacgccactgcactccagcctgggtgacagagtgagactccgtctcaaaaaaaagaaagagaaaaaaatgagagcgggaaagaaagaaagaatactgggtatcatataattgactcataaatatttcaatttttcaatttgtatctttttttttttttttgagacagagtttctctcttgttgcacaggctggcgtgcaatggcgcaatctcggctcactgcaacctccacttcctgggttcaagcagttctccttcctctaactgggattataggagtgcgctaccacgcctggctaattttgtatttttagtaaagacagggttttaccacattgatcaggctagtcttgagctcctgacctcaagtgattcacctgcctaggcctcccaaagagctggtattataggcatgaccaattggtatctttaaaagataaggaggactatgctgaaaattttaacaatggccacctgcagtggctcatgcctgtaatcccagcactttgagaggctgaggcaggtggatcactggaggccaagagttcgagaccaacctggccaacatggtgaaatgccatttctaataaaaatacaaaaattagctgggcgtggtggcaggggcctgtaatcccagctacatgggaggctgaggcaggacaatcatttgaaccagggaggcagaggttccagtgagccgagatcgtgccactgcactccagcctgggcaacagaatgagacggagtcttgctctgtcacccaggctggagtgcagtggcacgatcttaggtcactgcaagctctgcctcccaggttcacgccattctcctacctcagcctcctgagtagctgggactacaggcatatgcca[142 bp omitted]gccaacaataattttattctatcagcaaatatctcatcggcctcaaatttctatcaaaagtgtcataattttttttacagtttggagcatgatccaaatacagttcacacatgtatttggttgatatgtcttttttttttttttttttgagaccgagtcttgctctgtcacccaggctggagtgcggtggcgtgatctcggctcactgcaatctccacctcccgggttcacgccattctcctgcctc[135 bp omitted]gcctctcaaaatgctgggattacaggcgtgagccaccgtgcctggctgcttgatatgtcttaaagtttcttttagcctataggttcctatccatcgctttctcttctttttttttttcgtgtaatttatttgctgatgatgcattattttattttaggtgtattcaaaagaacatacacatggattttgtttattctttgttgtttctatgtatgcaatctgacagcctatgtcttttaagcgatcagtttaattcatttatatttattgtgtttgccaacatatttggctttattttcatcactttctttgattgtattttatagttaatatgaattttttctgctgcttccttttcatcttctcttcaaccttctgctgaatttgccagattttctttgttccttctcttttttttttttttttgagacaagagtttcgctctttttgcccaggctagagtgcaatggcgtgatcttggctcactgaaacctctgcctcccaggttcaagcgattctccggcctcagcctcccaagtagctgggattacaggcgcccaccaccaagcctagttaattttatatttttagtagggattggggttttactacgttggccaggcttcaaactgtaaaaaaaattgggtctcaaactcctgacttcatgtgatccacccgccttgacctcccaaagtgctgggattacaggcatgagccaccgtgcccggcccaagcccagccaatttaatatttaaagtagagataggattttaccatgttggccaggctggtcttggactcctgaccccaggtgatctgtccgcctcggcctcccaaagtgctgagattgcaggtatgagccaccgagcctggccttctttgttcctttcttattccccctcatgatttggaagttatgcattccatttctgcctttgagtagtcacccttacactcttaccatgtatacttagcttacaataactggaagttaatcaacatctctttgttcctccgaatgagacaaggacttcagatgtgtacatactggagctttcctccactctgcatgtcacttttatcccatatttgagttctgccttggcacacctaaggatggagatgaggacagggggtggtgtgtgcccatgtgggtcaccattctcccagatggatggcagatgtggagatggattccagagaccctaactgtctgtgagttcaggcaggttctgcattgggcctcagtttccccatttgtaggacagcactgagtccctctagggctaatatctgaagactgtgagctcccaccctctcccttcttcccaccactcaggatgaccagagtgcaggggcctctggttacactgcagataatgaggggcctctgtcgctaggcccaccacaaaatgagcttgcaggagaacgcgacagctaatgtcattatttacttcactgagctaaataatctagggaattgctcatcaggacctgataatttgattggatttcatgcacaattaggtcttcagagctgaggcattagtcggcgagttcaggaaagacaccaacctccctgctggagaggctcaaggtaaggggacaacgacggagatccccagccccaggaaagggtcaggcgtgcaggccagagggaggcctgaattggccaaattcagtggatccagcctaggctggagctggagacccaccagtcatagtcaacttgacattgcttacttacgagttggttgatattagcagaattattattattattattattatttgagatggagtcttgctcttttgcccaagctggagtgcagtggcgcgatcttggctcagtgcaatctccgccttctggattcaagcgattctcctgcctcagcctcccgggtcgctgggattacaggcacccgccaccatgcctggccaggagaatgatatcacgggagaaacaaccatagtgaacacagttaggtttggtcacttttgcttgagatgtttatttttcttcttacatgaaagaattcaagatgaccccttaaaatctaagtcagggccaggctcagtggctcacatctgtaatcccgacactttgggaggccgaggagggtggatcacctgaggtcaggaatttgagaccagcctggccaacatggtgaaaccccatctctactaaaaaatacaaaacttagccaggcaaggtggcaggcgcttataaccccagctaccctggaggctgaggcaggagaatcgcttgaacctgggaggcagtggtggcagtgagccaagatcatgccactgcattccagcctgggtgacagagtgagactccatttcaagcagaagaagaaaaaaatctaagtcagatctgtccttctcctgcctacagccctctggctcccacctccctccaggtcaaagctcaagtcctcccagaggcccaccaggctctttacaacctttcctgcccccttcctgccctcccctcctccctctcttcgcctcgttcactctgccccagccagacgggcctcttcactgtccctccaacaccaatacaccaggtgcggtcctgctccagggcctttgcatgggatgcaccctcttcccagaacagctgtgcccccagatcccctcagagttgtctcattttcctgttctaggtctcagcttaaacgtcacctcctcagagaagccattcctggctaaaataacttcatccccaccatttgctatgacgtcatcttgttaaattattacctaggctcagcaccccaatccaaaaatccaaaatccaaaatccaacatgctccaattgaaaatgctttgaccgacgagttaatgggtgcagcacaccagcatggcacatgtatacatatgtaactaacctgcacattgtgcacatgtaccctaaaacttaaagtataataataatttaaaaaaaaaaaaagagaaaatgctttgaccgccgacatggcactcaaaggtaataaggctccttgcagcatttcagattttggattttcagattagggatgctcagctggcaagtataatgaaaatattctgaaatccgaaaaaatccccaatccaaaacacttcttcaccatggaaaaatgcttctgttccaaaggtttttttttcttttttctttttttttttttttttttgagacggagtcttgctctcgcccaggctggagtgcagtggcgccatctcggttcactgcaagctccgcctcccgggttcacgccattctcctgcctc[221 bp omitted]tgtcccccaagccggaacgcaatgacgcaatcttgactcacttcaacctccgtctcctgggttcaagtgagtctcatgcctcagactcccaagtagctgggattacaggtatgcgtcagcacccctagctaattttttttttttttttttgagacggaatctcgctctgtcacccaggctggagtgcgatggtgtgatttcggctcactgcaacctctgcctcctgggttcaagcgattctcttgcctcagcctcccaggtagctgggattacaggtgcccaccaccatgcccagctaattttttgtatttttagtagagacggggttttgccatgttggccaggctggtcttgaactcctgacctcaggtgatccacccgcctcgtcctcccaaagtgctgggattacaggtgtgcgccaccatacttttgtatttttagtggagatggggtttcaccatgttggccaggctagtctcgaactcccaacttcaggtgatctgcctgcctcagactcccaaagtgctaggattacaggcatgagccactgcatccagccatcccaagcattttggataagggattctcagcctgttttatcccagggaccagtgtctggtgcccccactctcttcccaactctgagctccccaggattgtccctctgtcccagccctgacccctcagtcagtgtccagctgtgtccagttttacttctccacagcctggtggctcctcatgagccaaaccaagacggaggactctctgggccccaatgcctgtattttggggtacatgaccctggaggcctttcctgcgtcatctccatcctatcccctccacagcacccattccaacatgagccacaggacaatcttgccatgtccaagtgcactgactttatttcacccccacccggcctttgcccatgctggtccctgtaccagaaacgcttttccccaaagccttttcttcctggcaatcaattgccttcaatagctttgcttccagctcctctttctgagcccctctggccactgcccacccagttctgggtttcttccaccccagcctgaacatgaggggctgtggggtggactctgggagaccccgaggctccagcactggccaagactggcccgaataccccatgatgcctgctaaaagaacccccaaaagctactcaggcgattatgatccgaacagcactctgagtgtctagggctggccacatctctctccctctctcccagttctccatgatgatctctccgtctctccttatctctgtgtgtatctctgggtctctacacgtctctctgtgtctacatctccctctctccctctctctctccctctcccccctttctccctccgtttctctttctctctccctcctctttccttccccctctctttctctctctcccctttctcattctctctttccccctctctccccgccctttctcattcttctctctctctccccagccctctctttctctgtcttcccccgaccccccacctgggtctctctgcttctgtatctttttgtctctgctcctcccatggggcaccagcttcacccaccaccttcttccccacccctccctcttctccactttctcccttccccacgccactgtggatctggcactggctgggcacagggggatggtctggccttcctcccccacctctcctgtctctgcctctcctctgactcagcctctcctctgtctctgcctctcctctgactcggcctctcctctgtctctgcctctcctctgcctctccctctcctctgtctctgcctctcctctgtctctccctctcctctgtctctgcctctcctctgtctctccctctcctctgtctctccctctcctctgtctctgcctctcctctgtctctgcctctcctctgtctctccctctcctctgtctctgcctctcctctgtctctccctctcctctgtctctccctctcctctgtctctgcctctcctctgtctctgcctctcctctgtctctccctctcctctgtctctgcctcccctctgtctctccctcttctctgtctctgcctctcctctgtctctccctctcctctgtctctgcctctcctctgtctctccctctcctctgtctctgcctctcctctgtctctgcctctcctctgtctctgcctctcctctgtctctgcctctcctctgtctctccctctcctctgtctctgcctctcctctgtctctccctctcctctgtctctgcgtctcctcagtctctccctctcctctgtctctccctctcctctgtctctgcgtctcctgtctctgcctctcctctgtctctccctctcctctgtctctgcctctcctctgtctctgcctctcctctgtctctccctctcctctgtctctccctctcctctgtctctgcgtctcctctgtctctgcctctcctctgtctctccctctcctctgtctctgcctctcctctgtctctgcctctcctctgtctctccctctcctctgtctctccctctcctctgtctctgcgtctcctctgtctctgcctctcctctgtctctccctctcctctgtctctgcctctcctctgtctctgcctctcctctgtctctccctctcctctgtctctgcctctcctctgtctctgcgtctcctctgactccgcctctcctctgtctctgcgtctcctcagtctctccctctcctctatctctccctctcctctgtctctccctctcctctgtctctgacgttctatttccgtctcgcaggctctgggtgcacatctcccccggggctgccaacctctgggctccacactccccactctcctgcggcacccccctctctgctacttccagatcccccacctgctcctgcctcccaggtactgaggcagagacgggagatggagtttatgagtttttttgaggcggggtctcgctctgtcgtccaggctggagcgcctcatagtggtgcgattatagctcactgcagcctcgaactcctgggctctagcaatcctcctgcctcagcctcctgagtaaatgagactacagttgcctgctaccatgccagctaatttttaaattttctgtagagatgggatctcgttacatagcccaggctggttttgaactcctggcctcaaggggtcttcccgcctcagcctcccaaagcgttgggattcaggcgtgtgccagaacacctggcccagggagatggaattcaaatggattttaaggcttcaccttctccctggctggctggggaggaacagagagggaaaggggcctccccgaggtcacacagcacctggcctgggaccccctgcggctttgagtgggagtccccacagggctccggatttgagttcagcagcccaacccttgctgtgcgattgggggcagtcaactctgcatctcggagcctcagtgtcctcctctgtgtagcaacaatggctgtgccacctccatgggtgacagtgaagccagccaacatagggaaggtgcttctgactttagaacatgggaaattggaagcatgggaactactatagacatctattcccattcccaggaggtggccgggcgctgtggctcactcccagcactttgggaagctgaggcgggtggtgaaaccccatctctactaaaaatacaaaattagctgggtatggtggcacatgcctgtaatcccagctactcggggagccgaggcgggagactcacttgaacctgggaggcgaaggttgcaatgagctgagatcgtgccactgcactgcagcctgggcaacagagtaagactctgtctcaaaaaaaaattatatatatatattcccaggaggcggaatgggaggatgggaggtggggaggggccagctttgtgtgagaccctcatccagagggcaaatttgttctgagagagtgcccaggggtgcacagacttggggtgaggcggctgggaagagcttgtctgtttcaccaagaaataagtgtgaatgcagggagatgggggtggaggagagcactggggttgcctagcaacagagatgaagctgacagacaggatccagacctgctgtccagggtctggggggtttcaagaaaggggggtgctgatatttgggatcttgtgtttttctggctgagaaggtatccccaccatggccctccaaacttcagcagagttgaccccagactcaggggtcttagggaccccggagcctagaacagagagattcagtggtagccggagattcatgtactcgggaaagaagcagtggagacaaaagcagactcggccccctttccagccccggccctgacagttgcagagatgttgatggctgaggagaaccggattgccatttatgaacttctctctctctctttttttttttttctgtgacttgagttttgctcttgtcgcccaggctggagtgcaatagtgtggtctcggctcactgcaacctccgcctcctgggttcaagtgattttccagcctcagcctcctgagtagctgggattgcacgtgcccgccaccacgcctggctaatttttatatttttagtagagacggggtttcaccatgttggccagtctggtctcgaaatcctgacctcaagtgatccccccgcctcagccttccaaagtgctgggattacaggtgtgagcccccgtgcccagtctatgaactcctttttaaggagggagtcatggtggccaagaaggatgcccacctgcctaagcacccagagctggcagacaggaatgtgcccaacctacacgtcataaaggccaaacagtctctcagatcatgagg[139 bp omitted]cctcagcctcctgagtagctgggattacaggcacccaccaccatgcctggctaatttttgtatgtttagtagaggaggggtttcaccatgttggtcaggctggtctcgaactcctgaccttgtgatccgcccgcctcagcctcccaaagtgctagaattacaggcgtgagccaccatgcctggccaactggagacgtttctactggtaccttaccaatgagggtatctagtgtctccatgatgacctccagctgccctcagagagtgtgcctgccactctatgccgcagccgtccagagactggtagaccttggcctaaacgtctggagggtgagtgccctccaagactcccaagaggggaagctgacagagacccacaggtggggcgctgtgccccctggtgctggccaggaagccaaggctggggctgggccagcaaccgaattccagtttagaggtggatttggtggtggacatggtcagccacctcggtaaaattggagaggattagtttgcactgaataaacttacagccagaaaaacaaacaaacaaacaaaaaacagacttggccctgtcttcctggcagttccagcctcatggctggaaacatatataattgtttgttttgagacagagtctcactctgtcactcaggctggagtgcagtggtgcaatctctttgctcactgcaaccttcacctcctgggttcaagggattctcctgcctc[134 bp omitted]tggcttcccaaagtgctgggtttacaggtgtgagccacctcgcctggtcggattctagattttagattggccagtttggtcccagctgttgggggcgggactggagaaggtgggagaggctggggaagagcccttgggcagaggggagggaaggatggagacgaggcaggaggtgggacctatgtagagggcagggcaggaggtgagtttgatgcctgcctggggctggggccttggaccttcccctctaggcagccctgcctctgaagctgtttctgagttttctgccttccccatcctctgaattcccctgtctctccccgcctcgctccctctgctgcccgtgatgaagaatggaattatatttttataacttcttgtttttcctgaaccaagttccatgtgcactgggctaaatttaaaaagcggatggatggagagatgatcatgttcactttcactcccttggaaaaaaataaacgccttgattcaggtgccatttccctcggggacactgggggcggggtggtggcctttctgctcacagtgacagggctggacagagataagtcagacctggattccagctgcctccttccggaagccttgcctgacctgtgcctgaaccaggcccacccctcagatcttctgacaccctgggcatcccccaaaacagccctggtcaccctgtgc[144 bp omitted]ctcccagattcaagcaattctcctgcctcagcctacctagtagctgggattacaggcgcgcaccactacacccatcctttgccatctttagggctagcttctcaacctttagggcttagctccaatgttacctcctccaggaagccctcccggaccgccctgactaaagaagctacgaagttgttttctatcacatcatcatcataatcttctttttttttatgagacagggtcccctgtcgcccaggctggagtgcagtggcatgatcacagctcactacagccttgaactcctggactcaagcaatcctcttgcctcagcttcccccgtagctggaacgtagctagcacaccaccatacctggtgcttgtattttctttttttttttttttgagacggagtttcgcttttgtttcccaggctggagtgcaatggcatgatctccggttcactgcaagctccgcctcccggattcaagccattctcctgcctcagcctcccgagtagctgggattacaggcatgtgccaccacacctggctaattttgtatttttagcagagatggggtttctccgtgtgggtcagggtggtctcgaactcccaacctcaggtgatccacccacttcggcctcccaaagtgctgggattccaggcgtgagccaccgcacccagcgcttgtattttctttagaacattttttatcacccggaattctcttaggctaatatttgtaatttgttaagcacagttaagggaactggatctggactgcctaacccctcccaagtcccaactacaggctggcccctgccagcctgtccctgtagccttcattttcactctccctgcattattcagtcaccactcagcaaacatgttttaagtggctactgcactagaccgtgtatctcatggctcctagtcctgccctggtgcttacaatcacccagggagtttcaaattccaaccaacaccttccatccctcccctccactggagattatgaatgaatcggtctagagctgggggctgggaaaaggattcaagtgtgccctcaggacatagaacaattgctgtaggttttgttttttcctttttttttttttttttttttttgaggcagcgtctcactctgtcgcccaggctgcagtgcagtggtgtgatttcggctcactgcaacctccgcctcccaggctcaagtgattctcctgccgcagcctcctgagtagtagctgggattacaggtgcatgccaccacgcctggctaagttttgtattttaagtagagatgggtttcaccatgttggccaggctggtcttgaactcctgatctcaggcgttcctcccaccttggcctcccaaagtgctaggatgacaggcatgagccaacatgcccagcctctgcaataggttttcttatctcccaaaggccgtgctcactgctgcccccaagcctttgctgaagctggtccctctgctggaacacactcctgcttcctctccacctatttaaatcctccataactttctttgttataaacattttttttttctaattttgaggaaagtaaaaaggaaagacaagtgcaaagacaaatatagcaagcacctgtgtttcctccacacaggaccagcggtgcttaacccttctcatgtttgcttcaggcctgttttgttttgtaagtaagaatggaaatactggaagtcaaggtacagtggcctttgacctcctccagtcacgcatttttctacattcttatgtgtataaactctcacccatccatgaacgtgactagtgtaattttgcacactaaaaataaatcttaatattctcataaggtacatatcatcctgcaatttgctcttttcactcaatattttattttattaattttttaaatatttattttatttatttatggatttattttgagatggagtttcattcgtgttgcccaggctggagtgcaatggtgcaatctcggctcaccgcgacctccgactcccgggttcaagtgattctcccgcctcagcctcctgagtagctgggattacaggtacacgccaccactcctgactaatttttttgtatttttagtagaggtggggttcc[132 bp omitted]gttttggttttggttttagagatgcagtcttcctatgctgcccaggctggagtgcagtggctattcacaaacacaatcatggcacaccacagcctcgaactcctggcctcaagtgatcctcctgcctcggcctcccaactagctgggactaccactgcaccccgctctattcctggtttttaatattacaaaaggtgctactatgaaaagtcttttcctctctctttatgcacttggcaaagtatttctctaagaactatgactagaaatggaatcactggaacattggatgtgtgcgtggtttacctgactatttaatgcccaagtgctttctaggattaagctacaaccggtaactgtggaagctccccttcttccattttttttttttttgagacggagtctcaatctgtcgcccaggatggagtgcagtggtgcgatctcggctcactgcaagctccgcctcccgggttcacgccattctcctgcctc[224 bp omitted]tgtgcaatggtgcaatcttggctccctgcaacctccgcctctcaggttcaggtgattctcctacttc[134 bp omitted]cggcctcccaaagtgcggggattacagatgtcagccatttcacctggccgtctcccatggttttgctgatacttgaaaccttgagtttttcaggctttctcttcaaatctcccccagtctattgtggcctttttggaccctccaggctcctgggttttgccacagggccacctcactgcactcatggtgctaggcaccctcgcctgcagtgcaccatcgctacccagtttgagcatgaaagaaccaactgtctctggcttcagactcttaacaattggaagtggaacctgccaggcactgcggctcatgcctgtaatgccagtactttgggaggcggaggcaggaggttctcttgaggccaggagtttgagaccatcctgggcaacgcagcaagactcccgtctctatgacaaatatataataaaataataaattgggagtgactctcaggtcctagcgctttccccccatagctattccagaaattccaagatcttacacattacgcagaaaaggcgcttatcaacattcttttgccagtcattaaaacaaccactcccacgataacaacaaaaaagaaaaagtggccgggtccggtggctcacgcctgtaatcccagcaccttgggaggccgaggtgggcggatcacttgaggccaggagttcaagaccagcctggccaacgtgatgaaaccccgtctccactaaagatacaaaaattagctggacatgttggcacatgcttgtaatcccagctactcaggaggctgaggtaggagaatcgcttgaacccgagaggcagaggttgcagtgagcagagattgtgccactgcactccagcctcggtgacagaat[258 bp omitted]gcttgcagtgagctgagattgcgccactgcactctagcctgggcgacagagcgagactccatctcaaaaaaaaaaaaaaaaaaaaggaaaattactacccaggctcattgacaagtgcaatattacagcttcaggtatggttggatccaggaacttgactcatgacattagcaatttttctcttgccatctctcaactctgctttcttctgggctggcttctcccagcctcacccccgaggtgggctcccctttcttagtggcaaggatgcccctcagtggctccaaattccatcctcccagctctatatcctgcgggtagggacacagagcctcctcttctcattctcactggctcagtcctgaaccaatcatagcaacccccagaagaggtagtgctctgattggccaggacagctgggggagggtggagtcagctaactactgagaccagaagtggggaaagggctgctccccaaggaaaattggggttgctggttgctaaggaagagagtcggcaaaaccaactgtgattgccactaggaaactcaaggcaaagaattctcaaattctttttttttttttttgagacagagtcttactctgtcacccaggctggagtacagcggcgtggtctctgctcactgccacctccgcctcccgggttcaagtgattcttctacctcagcctcccaagtagctaggattacaggcgtgcaccaccatgcctggctaattttttttttttttttttttttttttgtatttttagtagaggaaggggtttcaccatgttggccaggctggtcttgaactcctgacctcagatgatccgcccacctcggcctcccaaattgctggaataacaggcatgagccaccgcacctggcctccttggggttctgagttctcttacgctaaaatcaaggtgactgcaggattgcattccttctggaggctctagaggagaactactttccttgcttttccagcttctagaggcttcatttttaatttaatttaattttatgttgtagagactggggtctctctatgttggccaggctggtcttgaactcctgacctcaaaggatcctcctgccttggctttccaaagtgcagggattacaggcatgagccaccatgtccagtcttcagaggcttcttggattccttggctcatggccccttcctccatctccaagccagcaagggctgatggagtctttctcaagctacctcaccctggttgttcctattatcgatcaggtctacttctctgaacctggccttcctgcttccttctttttttttttttttttttgacagagtctccagagtcttgctgtcttgcccaggctggagtgcagtggcgtgacctcagctcactgcaacctccgccttctgggttcaagcgattcttctgcctcagtctcccgagt[137 bp omitted]gcctcccaaagtgctgggattataggcatgagccactgcgccgggccccatcttttcttttttggttaggtttggtttgttttttggagacggagtctcactctgtcactcaggctggagtgcagtggggcaatctcggctcaccgcaacctccacctcccgagcacaagtgattctcccgcctcagcctccagagcagctaggattacaggtgcccaccaccacacctggctaatttttgtatttttagtagagacagggtttcaccatgttgggcaggcttggttcaaactcctgacctcaggtgatccaccctcctcggcctcccaaagtgctgggattataggcatgagccactgcgcccagcctccttcttccttcttataagcaccctgtgattgcactgggtttatccagataatccaggatcatctcctcatctcaagatccttaatgtaatcccatttgcaaagtgctttttgccaactgaagtaccatatgcataggatttgggaattaggatgtggacatctttggacggggaggtgtcaatattcttccaagcacaatgggccataaagaggaacagacatgggtgcatttgtttatttcacaaacatttattgagcacctactgtgtactcacctgttctaggtcctgagaacacagcagaaaacaagacaggccagatacagtggctcaagcctataatctcagctctttgggaggcagaggtgggcagatcactagaggtcaggagttgaagaccagcctggccaacatggtgaagccccgtctctactaaaaatataaaaattagccgggtatggtggcaggcacctgtaatgccagctacttgggaggctgaggcaggaggatcgcttgaacccaggtggcagaagttgcagtgagatcatgccactgcactccagcctgggcaacaaagcgaggctctgtgtcaaaaaaaaaaaaaaaaaaaataggccatgcgtggcgactcacacctggaatcctagcactttgggaggccaagggaagaggatcacctgaggtcaggagtttgagaccagcctggccaacatggcaaaaccccatctctactaaaaatacaaaaattggccgggtgtggtggctcacacctgtaatcccagcactttgggagccaaggcgggtggatcatctgaggtcaggagtttgagaccagcctggccaacatggtgaaaccccatctctactaaaaatacaaaaattagctgggtgtggtaggcgcctgtaatcccagctgctcgggaggctgaggcaggagaatcgcttgaacctgggaggcggaggttgcagcgagcggagattgtgccattgcactccagcctggacaataagagcaagactctatctcaaaaaaatatataaataaacaataaataaaaatacaaaaattagccgggcgcagtggtgcgcacctgtaatcccagctgttcagaaggctgaggcaggagaatcacttgaacctgggaggcagaggttgcagtgatcagagatcacgccactgcactccagcctgggcgacagagtgtgaccccgtctcaaataaataaataaataaacaaataaaaaagaaataaataaattacccaatctcagggacgttctttatagcagtgtgagaacagaccaatacattcagactgcagtgagccgtgatggcaccactgcattttaacctgggtgacagaatgagaccctgtctctaaaaaaaaaataaataataatccttttttttttaaatcacaaaggtgaaaggaaaatcagcttctctcaccatagattgaaggtaactgaaaatataatttagtctgattgacttaaatggatcccgtagtgacggaaggaatgacaggtgggagagacttaacaaccactccctcgacccctcgcccctggcaggacccacttgagacttgagaaagacagaacagatattcaaaggggtcactgtgcaactgggcttccaggttatttcataccacgccaaacactctctgaagtcatattttgttttgttttttgtttgttgttggttttgagatggagtttcgctcttgttgcccaggctggagtgcagtggcgtgatctctgatcactgcaacctctgcctcccaggttcaagtgattctcctgcctcagccttctgaacagctgggattacaggtgcgcaccactgcgcccggctaatttttgtatttttatttattgtttatttatatatttttttgagatagagtcttgctcttattgtccaggctggagtgcaatggcacaatctccgctcgctgcaacctccgcctcccaggttcaagcgattctcctgc[134 bp omitted]gcctcccaaagtgctgggattacagtcgtgagccaccgtgaccgggtaatttataaaggaaagaggtttaattgacttggttcctcatggctggggaagcctcaggaaatttacaatcatggtgggacaggaagcagccttcttcacaagacggctggacaaaggagaaacttcaaacacttataaaaccatcagatctcatgacaacttactcgctatcaggagaagagcatgggggaaactgcccccatgatccaatcacctccctccctcaacacgtggggattacaattcaagatgagatttgggtgaggacacagaagcaaaccagatcactgggccttccaggctcaagtgatcctcccacctcggcctcctgagtagctgggaccacaggtgtgcaccaccacatctggctaatctttgcattttttttttttttttttgtagagatggagtctttttatgttacccagactggtctggaactcctggcctcaagtgatcctcccggcctcaagtgatcctcccgcttcagcctcccaaagagctgggattacaggcaagagccaccgtgcccggctaaaaaagatttttaaaatacattgactgatatttcagatgtgaggtttaaaggaaaatagataactgtggatatggggaaatggaagaaaagatgagaagccattggcacggatttgggaagcattacctgtctcttacacatggggaaacagaggccccgccatgaccatgactcaccaggtgggctgaaggtctttcttcaggaggagagctgaagggagctagaaaagttttcatcggttggctgcaggggctcacgcctgtaatcccagcaccttgggaggctgaggcaggtggatcacttgagctcaggagtttgagaccagcctggccaacatggtgaaacccatctctactaaaaatacaaaaattagcttgatgtggtggcatgcacctgtaatcccagctactcgggaggctgaggaagaggaaggagaatcgcttgaacccgggaggcagaggctgcagtgagccgagatcacgccattgtactccagcctgggcgacagagcaaaactccatcttaaaaaaaaaaaaaaaaaaaaaaagagcgtttcattagcattcccctatccctctgtgagtggttttctccctctcccttgctcatcccgagctgattagagcaagtgctctatgaagatctccagggaacagcatcccaggctatgggcaccatgcatgcaaaggccctggggcaggaccacacctggcatgttggaggaatagcaaggaggcccatgtggctggaatagagtgagctaggggtagagagggaggaggggaggggaaggaggggacgggacaggtcgtgcgggccgtcatgggctgcaggaaggacttgggtcttgaccttgagggaggtgggagccatagagggctgtggacagaggaggaacaggacctgagtcaggtgctcacaggcaccctctagtggctttgcagagaatgcactgaagaggcagggcagtggccaaggagagaccagtccagctctcagcacatgctgtgtgtctccggggcaagggaagtcactctatgggctcattttccttatcagctaaaaggggaactttaacagcaggcagagactcagaaaatgagcagaaggagctcgctgcctgagattcaggccaggcgtggggctgctgagttaatacttttaacaggtcaggattctgctcaccacactccgggaggtgggaagatgaggtcagccacacccccagctcaggctctgatgaagtcatcgtgacagatgggtaagtgtgaggacagctgtgggaatatttcccacctgtgccctgtgcctcctgcaaagatgtagatgagcaaatcaaccggcatttcacagtcagacacagctctcagcacaccgcgctgtctaggagcccttcctgcaggaagccctcccggattgcctgggccctgtggggtctccctggaagctgtggcaggggtggggggcatttcagggagataaggagcagagaggctggctagaccgagccatggtgaggaaagacagggcggacgacagaagtgctccacgggtgaagggacatgctgggccatcagccacataagtctgatttgaatcctgacccagattcccacttgctttgtggacaagtctgctcccttcctgggctttgttttctcaaccacaaattgagaaaagaaatctcatttgattgcttaacactcatttaagtgagcacctactgtgtgccaggccctgttttgggcaccaggaacatggcaggagaaaaatgggcccagacctgctcttccaggaccctcagtccagtagaggacctgaatgtatcaccgagctgttaaaatacaaggtgttagggctgggcgcagaggctcatgtctgtaatcccagcaccttgggaggctgaggcaggtggatcacttgaggccaggagttcaagaccagcctggacaacatagtcagactccaccaagacgggggttggggggggagagagagagaggagaggagagagagagaggagagaggagggagagagggagagggagagagagagaaagagagagagagagaaatgtccttgcctagtctagaggggcttcaggcacagtttgatcaaggggccccagtattcagtctccttcccggacttagctctgttctcctcccctggcttctgccacaaggcagatctcataccagtccttagcagatcccagctggtatttccccaggctggtgctgcctcctctgtagttctggactaagccccggggctggctctcatcagcccacactgagtcatgtcctgtagcagctgctcagaaccacagacatatctccctgttttggggcgttctctctgcccagagctaaggttcctgggagtagtcctttgtcaacgctggttgaacatgaggggataaataccctagcttttctgatctctgggtgcggcgattctcagctgttttctttctttttccttttctttttcttttttttttttttcagacagagtcttgctttgtcacccagactggagtcctgtggcacaatctcggctcactgcaacctcccaggttcaacctcccaggttcagatgattctcctgccttagcctcctaagtagctgaaaccacaggccctcaccaccacgcctggctaatttttgtattttctgtagaggtggggtttcaccatgttggccaggctggtctcgaactgacctcaagtgatttgcccgccttggcctcccaaagtcctgggattacaggcgtgagccaccgcgcccggctgccggtgtcttattgaggccatcagacaatgcaagagtgctgagtcccagcaccctgtccttgcagttttacaaatctctgaatctgctacgatcactgcatccatcttccagatgcagtcactgaggttccaaaaagtgaagtttcctttcctgcccgggatgactaaggacgctctatccccaggggcagcagaagatcgggctgccctctccccaaacacacccacccacccacccacaggggcacacacgggcacacacgcaccgtctacctccccagacacccggctgacacaggctggcgtctgcacggctgacacttgtaaatccaccctccttcgggggcaggctggctccttctctggcagcaggaagatagagggagttggtttagtggttggggggaaaggagtgcgcccctgaccccatgcccagcccccgaccccagggagggtgacagcccctccctctcttccagtgaccttgggaaagttccaggaggcccccgggcctggactttgagaggtgagcgctccagcaagattcgctcccctccttctgtccctgctctgggcccgcccacccactccctttctcaagcggccttggaaagggtcttgcagagacagacagatggcctggggacagatggcggacgtgtaggagttaccactgggagaggggtaagggggaggggagtgcgttctggcccccaagacgagtcccacaggctcctgcagaacagaataagccgcctccttcaagcccctcaactgggatatcatcgtccccccgcaaccaggatcccatcaccccataaacggaatcccatcccccatcccaaccagggtctcatcatccccgcaaacggagtcccatcgaccccacattcaaggttccatagctcccccaaacgggatcccatggcactgggccggggcagaggcccggagaagagggtcgctagctgcaggttgcacagcccggcagggtgcgaggcctggcctgggggtgcgggtgactctggtgggtctaggctccgcggggagacttgggcctggagaccccgccccgcacgcagatcccgcccgccccggccgcgggttccggggaagcgaaggcgccgccagcccgggctgtgggcagagcgcgccctctgccgggcatgatcggaaacggcgcggcggcgactcccggaccctcgggactccggacccgactcccacccggctgagctttaccgggttatagagcccccaactctggatcgatccccgacctcctaaggaaccgcgacactgggctgagctcccgccttgggctaaacctcaatcccagtagagctgggacctgggctgagaccccaactttggatagagcctctgatctgtctttgagccctggtcctgagccaagcctcaaactccaatagagtctccatcgacctgagctcccaactcagggctgagcccccctctaggctgaggtctgatacggaatagagcctgcgaccccttctaaatcccgactctgggctgagcctggaccctcgatagagtctccaactctaggctgaaccctaaccctgggctgcacccttactgtagacagagcccaatcccagcagaggccctattctcactaagccccatcacccagtaagcctgcattcccggccaagatcatccctcccccacccctaacacccactgaaccctagccctcccgagtcccaaccttcttatctgatacagaaaagagaccaggtgtggtggttcttgcctgtaatcccagcgctttgggaggcagaagcaggaggatcgcttgaggctaggagttcgagaccagcctgggcaacatagtgagacaccccctatctctatttaaaaaaataaaaattagccgagcttggtggtgcacacctgtgatttcagctacttgggaggctgaggcagaaggattgcttgaacccaggaagttgagactgcagtaagctgtgactgcaccactgcattccagcctgggtgacaaatcgagaccctgtctaaaaaaaaagaaagaaagaaaaaaggtgaaatcatgctaggctcagatgcctccagtcctcctgccctgatggggagacccccttgatgctggggttgcgagaggagctgtacacaccacaccaaagtcagacctaatcaggtcctaatcccatctctgcctcatctggctgtgtggcctggaacctatcccttcctccctctggggttccatttcgtcatctgtgaaatgggacagtcactcctgactctaccaccttgtgcctgtgtgacctcaggcaagttacttcctctctctgggcctcagtctcctcctccaaaatgaaataagaaggtgttttgttttgtttcttgaaacagagtctcgctctgtcgtccaggctggagtgcagtggcgcgatctcggctcactgcaacctctgcctcctgggttcaagtgattctcgtgccttagtctcccaagtagctgggactacaggcgtgcaccaccactcctggctaattttttcatatttttgctttattttttattttttgagatggactcttgctttgtagcccaggctggagtgcagtgccgcgatctcggctcactgcaatctctgcctctggggttcaagcaattctagcacctcagcctcccgagtagctgggactacaggcgtgcaccaccacgaccagctaattttttttttttgtatgttttattttttgagatggaattttgctctgtcgccccggctggagtgcagtggcccgatcttggctcactgcaacctctgcctccagagttcaagcgattcccctgcctcagcctcctgagtagctgggattacaggcatgtgccaccacacccggctaatttttgtatttttagtagagacggggttcca[131 bp omitted]tgaggcctgtgcctcggtcttcctgaatcccgtgtgcaggtcaggacacacaacaggccctcaacaatttgttgtctggcttcctggaggaagaagcagcgaggttgctatgggctccctaggccctagctgcaaccgggacccagagttgggctgcagggcggaaatggtgctgcaggggacctgggagcagctccagggcctggttcccaggactcacagctgcatcctccccgggggaccccagctggcgctgcgcagccgggaggctcctgtgtgtcctgcaggctcattcctacggaaatcgaggctggacctggggatcctctgatgaggtctccaggagccctccacctcaccccaaagattcatctatagccccacaaccctgggttagattcatcccttcttgtggcacagaactctgtatttttaaaattttaacttattttgatcttcttctttttctttctttctttttttttttttttttgtagagacagggtctccctaggttgcccaggctggtttcaaactcctgggctcaagggatcctcctgccttggcctcccaaagtgctgggattccaggcgtgaggcaccacacctagttggaatctgcattttaaaatggactctcagatctttctgacgcgaagggttccccgaggccgtactttgagaaacacgcttctgccgaaattcctattacccaggcgggtaaactagccccagaaggaggaaggggcccgtgcagaaccacgtggttggtctgttttgccttttggctctctggtctcttcctgttggtgtctctgtgcctccctccccaggttctctgtctgtctcgtactcttatctcttcccttttctgtggccggcacccccacgacggcctcgcccccgcatccgggccccttcgcgattccggaggaatcccccagagccgcctgaccccgcccccaggctccgccccttccccccacttcccccccgtcgcagtgccctgctcccattggccttttcgtacattgcccgccctgtcattggctaatccggagcgctcggcccgccccccaggcctggcaactctccggtcccttccgcgcgggcggggcgagtggagggcgtggcctgccgaggggcgaggcgagtggagggcggggccgcgctgcccgccccgccccggccccggccccggctccggcgctgctcccaccgccgcggcaacggccccggcccacggaggcggctggacggacccccgacggttggacgtacggactctgcttcgagagtaggtgagcgagcagtgccggggcgccccccatttcagcgcatctcgggggccacctggccgccctctgtctctcccgccccttaatgcttctgcaccccaccgcctgtccgtctacattcctgcctcagtttccgtctgtctctctgtcactctcgctgtataggttagggggagacagattgagtctcaattgccccccttggcgtggggctctgctctgggaccagcacccccatcccccatgtggactctagtggactctgccccctttaactgtagggccgcaggtgctcaggccagattccagaaccctgagggcattccaggcggtgggcagctgggccagccgtgcggaggtgggcatgactgtagcttctagctaaaccaggcatcggtccaggcatcggtggcggggagccaggcctaggccagcccgggcccacccagactggcccctaatgagctcccaagtggcctgtggggacttggcctcagttttgccagctgtgaactgggaccgtcgctgctaaggtaattggcaggtgatctgaaggacacctgccgcctcctggccttttctgtgaagtcgaactaggcccatttcctgggatgggaaactaaggcctagaaagaggccaatgcttccaatgtttgtccagggaagtggggacagaggcaggacagaatctgttttctctgcatcctcacatttcccagcaccttctctatggaggggggaagggctggtggaggagcagccccaggtgtaaacaggccgccagagtttatttcctgagccagtcccagctcagctggaggcgatgaacgccttgggaggccccaggggggccagcccagtggtggcggagcttggaccaatctaggtttgagctctgccacccgcatgatatcttgaaccagtttttcaattctgcggagcctcagtttcctcatctgtaaaacaggagtgggtcgtaactccccaagttgagggctgctgggggatcagatgcaggaatacaggccctgctcataacctgcctgactctcgctgtggctctgccccagtcacactggcctcctcctgtttctccaacaccccaggcgaggtcctctctcagggcctttgcatgggctgtgccctctgccactacggcaggtccgagggcgccaactttgaaacataacaagctccctggatgggccggacccaggacctgcacaggcaagggctgggaggggcagaggaggggccgctcagggacgctgtacctatggaaaccgtgaacaaagggctgtctccagccacacaaacacctgggtgaatcgggcactggccagaggctggagcagcctgggatacaggtggtgggtgagtgcctggacccctgcagggaatatggggccgggggggggacttgaaccctgctccaatggtggggtggctctgcagacgggtgcaggtctgaggccccgcggtacggcccctcccactgtgtggccttggaccgacggtcaggtgcccccagagcctcagtttcctcatccccgttcccccaggggtcagcccaggtgggtgaggggtcttttgattgcttgacaattcagtatggtgggttccggaggcctcagtgtccctgtctgtccaatggggccacgaaagggtgccttgaggacaaaactccagccgttgacaggggaacactcctcccagagagacgtcaacgctaaaaaatgactcacacttgcccaggtacagctcaggtgttacagacggggagcagggcaaggaggcagagcgagaggcaggaacggcccagttccacagcatgcctgccccttcccagcatctcccgacacccctcagcagatgacctccctggaatcacacccgctcgagctttgacgcagggacctctggcagagttcttgggatcttgtaaatccccagcttctaggcctcagtttccccatctgtccaatggggctggtcatctcctttttcttgtggggctgagataactgtggggagggagggtgctttgaggggtgggggagattcaacaagatattgttaaaagcccgaggaggggattacaggacacagtacttctagaagcttcctaaggcttcgatccttcccctctggggtgggctctgggagagacgagacttgaaccccaaatgtgccattgactaggatgaggaaaggattgcactaggttaaaggctgggttcaaattctgattctgccacatcactgctttataaacaggcaagctcctgaccctctgtgactcagtttccttataaccaaaaacttgcaggtccatctagagaatttcccagcctgggcaacatggtgaaaccctgtctctacttaaaacaaagaaaaaaaaattagccaggtgtggtgtcgcaggcctgtagtcccagccactctggaggctgaggtgggaggatcacctgagcccagggaggttgaggctgcagtgagccgagctcatgccactgcacttcagcctgggcga[136 bp omitted]gagggcaaaaccctgtctctactaaaaatacaaaaatgaggcgggcgtggtggtgggtgcctgtaatccagctactcaggaggctgaggcaggagaaacacttaaacccaagaggcagaggttgcagtgagccgagattgcaccactgctctccagcctgggttgacagagtgtgagactccatctcaaaaaaaaaaaaaaaattaaaaatatacacataaaataaataaaatagatgggggatctgggagggcttcctgaggaggggccatgtaaacccagacctggatgacaagaaggaaacagccatgtggagacctgggagaagagcagctcaggcagagggcacaggttgtgtaaaggccctggggcaagatggcgcctggcatggtagaggagcagcaaggaggcccgtggggctggagcagtgaggaggaggagagagggaggaggggagggcagggaggggacagggcagggtgcgcaggatcttatgggctgccaggaatacttggctttgaccccaagggaggtgggagccatggagggtggtgggcaggggaaggatggaacctgactcaggtactcacaggcacccattggctgctacagggaggacagacggggggcatggggatagatggtgctgagggacgaggggaccaggatggaggctgtgggggagataagaagtgggttgcgttaggccaggcagggtggctcatgtaatcccagcactttgggaggctgaggcaagtggatcacctgaggtcaggagttggagaccagcctgaccaacatggtgaaaccccatctctactaaaaatacaaaaattacccaggcatggtggcacgtgtctgtaataccagctactcaggaagctgaggcaggagaatcacctgaacccaggaggcggaggttgcagtgagccgagatcacgccgctgcactccagcctgggcaacagagtgagactctgtctcaaaaaaaaaaaaaaagtgggttgcattgggacacatttaggggctggatgcacctcctgccaggtgatcctaggcttctctgcactctaataatttattgcttgggctgaggcaagcctgtcccctcctctgcagagtcatgggctgtgggtagctgataattcatgtttggccctcgaaccctttctccagtggaaatctggccacagtggaaagtgtccaggctccccgccacaacccagcaggcagctggcccctgcccatccatggggtggtcctgagggtgctggggaacccagtttgagaacaactgatgtcacccccaacttgggccaacagattcccctctctcttttgccataactaaaatggacactggcgaagtatggcggctcatgcctgtaatcctagcattctgggaggccgaagcaggaggatcgcttgagcccaggaggagaccagcctggccaacatggcaaaaccccatctctactaaaaatacaaaacttagccaggcatggtggcaggtgcctgtaatcccagctatttgggaggctgaggcaggagaattgcttgaactggagaggtggaggttgcagtgggctgagatcgcgcaacagagcgagactccatctcaaaaaataaataaataataaaattggccgttcacggtggcttatgcctgtaatcccagcactttgggtggccgaggcgggtggatcacctgaggtcaggaattcgagaccagcctgaccaacatggagaaaaccccgtctctactaaaaatacaaaattaaccgggcgtggtggcgcatgcctgtaatcccagctacttgggaggctgaggcaggagaatcacttgaacccaggaggcagaggttgcagtgagctgagatcatgccattgcactccagcctgggcaacaagagtgaaactccgtctcaaaaaaataaaataaaaataaaataaaatggacactggccaagtgtggcagctcacgcctgcaatcccagcactttgggaggtcaaggcgggaggatcacttgagcccaggagttcgagactagcctgggcaacatagcaagacgccatgtctaccaaaaaaaaaaaaaaaaaattaaccaggcatggtggcacatacctgtagtcccagctactcaggaggctgaggtgggaggatcacttgagcccaggaggtcgaggctatagtgagctataatggtaccactgcactccagcctgggcaacagagtaagaccttgtcttaaaaaaaaaatgaataaataaaaataaaatggacaccggcttgcaagtcctgagtcatggatttttttttttttttttttttttttgagatagagtctcactctgtttctcaggctggaatgaagtggagctcactgcaacctctgccccccaggttcatgcgagtctcgtgacgcagcctcccgagtagctgggattacaggcgtgtgccacacacggctaatttttgtatttttagtagagatggggtttcaccatgttggccaggctggtcttggactcccgacctaaggtgatctgcccgcctcgacctcccaaagtgctgggattacaggcatgagccaccacgcccagcctgtgagtcatgggtcttaaagggcttggtgcagtgggaccctgggagtcggtgggatgaggcctgggatcactggcctcggcgggaagaggcctgaggccccccctgggcccccggactgagtgcagccggggctgagacaagacagatggagcggctggcgtgcacctgcagagcagatccatcaattattgacactctgtgaggtgcatgaagaattcatgggacaggggtggggacggcagggacttgtgacataattgcagccagctcaccagagccacctcctgtgttttcaggaattttgccatctggtagttaaacgcagccattatttaacgtgggagaatataaacttatagttaaggctgggcgtggtggctcccacctgtaatcccagcagtttgggaggccgaggcgagtagatcacttgaggccgggagttagagaccagcctggccgacatggccaaaccccgtctctactaaaaatacacaaatttgtatttttgtacaaatacaaatacaccagctgggtgtggtggcatgcacctgtagtcctagctacttgggaggctgaggctgaggcaggagaatcgcttgaatccgggaggcagaggttgcagtgagctgagatttggccactgcactccagcctgggagacagagcaagactccatctcaaaatacatacaaacatacatacatacataaacttatagttaaataaagtacatttaagccaggggtggtagctcacacctgtagtcccagcactttgggaggctgaggcaggaggatccgtctcaaaaaaaaaaaaaaaaaggaatatagggagcaggggaagagtcaagggagccagggagttggtgcctggtcacccattttgcagatgggaaagctgcccccatgcatggggcctgccaagggtcacagcagggagacctcagagctgtggacggacctggacagaggctgtggacagggctgaggcctcctggctgttcctgtaacaagcgtgacacagccctgccccagggcctttgcacaggctgtgccctttgcctggagcatcttcccgcagaccctgtcattgcaggcccagttcaactggcccagcctctccctagagaggccctcctggttaccctgaacttcatcccccacccccgtggcccatatctctcttcctgaaattaacttgtttgtttctatttattggttaccggcacctcctccttccagcaggggaacagtttttgcacccaggctggagtgcagtggaacaatctcgactccctgcaacctccgcctcccaggttcaagcggttctcctgcctcagtctcccgagtagctggaattacaggtgctcgccaccacgcccggccgactttttttttttttttcagttgagtccgggtctcactatgttggccaggctagtcttgaactcctggcctcaattgatcctcctccctctgcctcccaaactgctgggattacagttatgagccaccgcacctggccaatcattgttttaaagtgtacaatttataaccagaaagttatgtgaccatcataaatttctggaatctctaattccagaacattccattaccactcaccccaaaaaaacctggttcccaatttagcaatcgctttccattttcccctcttccagtttccagcacccgcgagtccgctttctgcccttgtggacaggcctctcctgaacatttttttttttttgagatggagtctcgctctgtcacccaggctggagtacagtgacgtgatcttggctcactgcaagctccgcctcccgggttcacgccattctcctgcctc[134 bp omitted]ggcctcccaaagtgctgggattgcaggcgtgagccggtgcccggcccttcctgaacatttcatagaagtgggatcacacactttgtggccttgtgtgtctggcttctgtcactgggaatgatgtcctcaaggtgcatccacgctggagcttgtgtgtgagcctcgttccttttatggctagagaacattccattgtttggaccgatctcattttgtttattcattcacccattaatggacatacggacatttgagttgcttccacttgcaggctaccctgggtcacgccgctgtaaactgtgacgtgcaaaacaagtgtttgcgtggtgtatgcttgtgtttctcttgggtagatcccccaaagtggaattgctgggtcctatggtaactgtgtgtttagatgtctgaggagccgtcggactgggtttttttgttttgttttttgttttttgtgacggagtctcgctctatcacccaggctggagacctcggctcactgtcactgcaacctccacctcccgggttcaaatgatcctcctgcctcagcctccagagtagctgggattacaggtgcctgccaccatgcccagctaattttttttgtatttttagtagagataaggtttcaccatgttggccaggctgatctcaactcttcacctcaggtgatctgcccacctcagcttcccaaagtgctgggattacaggtgtgagtcagtgcacctggcttttttttttttttttttttttttccttttgagacagggttttgctctgttgctcaggctggagtgcagtggtgtgatcatagctcactgcagccttgacctcgtgggctcaagcgattctccccctctcagcctcccgagtacctgggaccacagacccgtgccaccatgcctggctaattaaaaaaaatttttttttgtagagatgggatctcgctatgttgcccaggctggtcttgaacttcccagttcaagcaatcctcctgccttggcctcttaaagtgttgggattacaggtgtgagccaccttgcctggcccagatgattttgtaatgaggaggcagcttggggtctagaaagccagggccttagcaaggcagggatgggatctgttttgatgcctgctgtatccccagtgcctctgtggtctcttctgcaaagcaggcaacctggccagtaccaggtgggaatgacgaataggcacaggtcgctggctcaggacactggggtttggttacaagcttctgccccaggacagctggtgctccataaatgctcgttgagccactgaatgggtgttaacacctgaatcccagaagctgtagcaggctgtgtgtgtttgtgacgatggcagggtgccctggcatttggagggcgatgcccctaggccccaggcagtccctaggaaggcccctgccctgtaagggctgatgcggccgctacaccgcctcctgcaggaaggaagacccaggtttattttggtcctcggcctgttcccctgggagagcagtcatcctcctgtctggctgcctggatgggagcgtttctggcagaacaatgggtcagggaggaggaaggggaaggccaggcagctgggccgccccaggtgtcagcaggtcccggggctgccccggccgtcttaggagtgtgggggccaggaagggaggccacagctgcttgccccccatccctcttcctgttggccttgcagggggcgggggttgctcttgggagcccaggcccttcctgaatctgtaaacaggcctgactcccgtccggaatcaacttcttcagcctcaggactcacagatgggaaagtcaaggcccagcgaggggcacagccctgcctggggtcacggagctcccgagatgggcagaaagatgtgggctccagggccgatggggtccaggggcctcatccccagatgcagagaaaggccttttcctcttcgagtcccctcggtttattcatctatgaactggggaggctggacccaggggttcgggagtttcctcttagaatctgcaaacatccttttttttttttttttttttttgagattgagttttgctcttgttgcccaggctggagtccagtggtgtgatctcagctgactgcaacctacgcctcctgggttcgagcgattctcctgtctc[134 bp omitted]tggcttccgaaagtgctgggattacaggtgtgagccaccgcgcccggccagcttttttttttttgcacagggaatctcactgagatagaactaggtctgcaagttcacagagctgaggtgggcacggaagggcggaattccaggcagtggttgcagcctctcgtccagaggaagctcacagcttagggggcattgcggtttggtcacaagcttctgccccaggacaaagttcgttccgatcttccccatatttcagatggggaaactgaggcacattgttaagttgcttgctgcagaggccagagctgggagcaggccctaaatatcagggttgccctctaagactcacggccagttgagggcgttaggtggggaaggcacagggagttggggttcaagggcgttgagagccagtggttactgtattgctgtgtggtcttggggaagtggctcagcctctctgagcctttgtggtctcttctgcaaaacaggcaacctgcctagtacatggtggcgatgacaaagtgggcacacatcgctgactcagggtctgccacgtggcactgagtcaacagcacccctcttctggcctaggcctgtgcagagccagggtctggtgaccgaggtcggagggcaggggcggcccatccagcaattcccgtgcctgccctgacctcagagggcggccgagggtttggaacttctcccggagtctgaactcacacaaagaccggctttgtgggggctcctggggtaggtgggtgcccacatggcattccaaggctggcagcctggcgctggggtgggagtggaggctgagcagggtctggggcagtgagagagaccgggggcgggtctcaggccctccctcctccgccagttcttccacactcccctcttcattcagcagatgtttctggagtctgcagggacaccgtggataaggaattgggcccatgacctcccctgtggcctggggtgaggcagaccagttggggtgcagagctggggagcagaggagcaatggggatgcctggggaacctgcggctcagaggaggcagagacttgggggccaaagtgatggggatgtatagtttaccagggaagaggcaggggcttgggggccaggctttggggggtgtataggagttcaccagggaggagatggggccttagggtattgaggtccacagggaagagtcagggctccaagtgaggtgtggagcttggtcctgggagctttgaggagctgtcagcttgttctcagcaggtaagggctatgccctactctgagatttaggaagaattccggagctgcaggaaggaggtgggtggagggggaagctccagggctggggaaactgggcaggctacagggcagggtggacagagaaaaggagcagacagggacagggggatggttctgcagtgagaggcctggcccttatgcctcgagagctggccaggctctcaccttggccacctccccagtcccagcctggacgggggctgtccaagtcaatgtttccctgttggaggaatcatcggagccatgccttcccagaaaccccacaaatggccccctgtgaacccatcaccccctggctcactcggggctgaaggccttggacatgcctgttataaaccctgtcgggggccaggtgtggtggcgggcgcctgtagtcccagctactccggaggctgaggcaggagaatggcgtgagcccaggaggcggagcttgcagtgagccgagatcgtgccaccacactccagcctgggcgacagagggagattccatctcaaaaaatagtaataataataataataaaataaataaataataaataaaccaaccctgcgggggcagtgggactggaggcactgccatagtaatggggctcctccaccctgaacagccccgggtctggggctcacttggaaccccacctcatggagctgtggggtgagggtggggagtgttgagctggacctaggggatggaacggaaccccctgtaacaatcaccttgagccccttctcagctcatagcaaggatatgatgggtttgagggctggcatcagaccctacagatagtggggttcagaagggccttctctgtttgtttataataataatcataataataaatacaaaataaaatttttgattttttttttttagagatagggtcttgttatgttgcccaggctggtctcaaactcctggcctcgcaattctcctgcctcagcctcccagagcactgggaccacaggcatgaaccacaggcttgaattataggctgcagtgcggtggcatggtcttagctcactgcaacctccgcctcccgggctcaagggattctcctgcctcagcctcccaagtagcggggattgcgggcacccatcaccaagcctggctaatttttgtatttttagtagagagaaacatgggtttcaccatgtttgccaggctggtctcgcactcctaacctcgatctcaggcgatccgcctgcctaggcatcccaaattgctgggattacaggcgtgagccactgcgtccggcatgacactttttaaagaaacaaattccgttaggccctctggggtctgtggtgttgtcacctcttctgtgtgaggagtgccccaacgtgcaaaactgagggctggtctgtgtcccccgcaggccatggacaccttcagcaccaagagcctggctctgcaggcgcagaagaagctcctgagtaagatggcgtccaaggcagtggtggccgtgctggtggatgacaccagcagtgaggtgctggatgagctgtaccgcgccaccagggagttcacgcgcagccgcaaggaggcccagaagatgctcaagaacctggtcaaggtggccctgaagctgggactgctgctgcgtggggaccagctgggcggtgaggagctggcgctgctgcggcgcttccgccaccgggcgcgctgcctggccatgacggccgtcagcttccaccaggtggacttcaccttcgaccggcgcgtgctggccgccgggctgctcgagtgccgcgacctgctgcaccaggccgtgggtccccacctgaccgccaagtcccacggccgcatcaaccacgtgttcggccacctagccgactgcgacttcctggctgcgctctacggccccgccgagccctaccgctcccacctgcgcaggatctgcgagggcctgggccggatgctggacgagggcagcctctgaaccccggcgccgcccaaccgcgcccctcgcgccttttggggctctcctgctgggcgcgggtggggtttgtgggtttttttccacctcttttctcccaatcggactccggccaaactcccctagacagatgggtgacctgtctcctttgagaggatgctgaggcatctgtagcagctgtttcaaacaccaatgtcacctctcctcctggcccccgcccaatggggagaggaatttggggccctactctggggaccacctttcacccgtttgtactttctgggccacgccgacccctgggtcgcttgatgtaaaagccaaaagctgctgcctcccacttggatcatgtcgcctgggattttcatccctcgcacaaggactacgggttcacacggtgaactgggggaagggaagtgttagggggcaagtcgcggcacccccccttccataaactcacgtcctaacccccaggacctcagaagatgatctgatttggaaataggatcattacagatggaattagttcagatgatctcatcttggagtagggtggg[187 bp omitted]gtggcacatgcctgtagtcccagctactcgggaggctgaggcaggataatcacttgaaccaggaggaggaggttgcagtgagccgagattgtgccactgcactccagcctgggtgacagagcaagactctgtctcaaaaaaagaagcgggggagtgggggattgaggccacgtgcagtggctcactactctaattccagcactttgggaggccgaggcaggaagattgcttgaactcagaagttcaagaccagtctgggcaacatggtgagaccctcgtctctacaaaaaaaaaattatcgtggtgggccgggcgtggtggctcacacctgtaatcccagcactttgggaggc[134 bp omitted]gaggcaggagaatcgcttgaacctgggaggcgcaggttgcagggaggcggaggttgcagtgagccgagattgcaccactgcacttcagcctggtgacagagcgagactcgtctcaaaaaaaaaaaaaaaaaaaaaaaaaaaagtgactgtggtggtgcacacgtataatcccagctacttgagagatgacgagggaagatcacttgagcccaggagttaagaggctgcagtgaccgatgatcatgccactgcactccagcttgggtgagagtgggactctgtcttagaaagaaaaaaaaaagtatttggacacagacatgcatgcaaggaaggccaatgatgccggccaccaccaggagctgggagaggcccagggcagatccccttcagccttggagggacctagccctggccacaccttcatctcagacttgcggcccagagaactgaatgagaataaatgtgcgtgaagcccctcagtccacaggatgtggtactggaagcccccactcaagaaggctccagtgaatgctggcacgttcagccaggatgcctccgtgaagctggagacctctgccctgggtcgggaggggaaactgctccaatccagggactgccacatgggaggggacggagcgtgcccacctcccaggggtgaggggggacccacctgagatgtgtgcacattttatttatttattgttttgagacaaagtctcgctgtgtcacccaggctggagtgcagtggtgaaatctcggctcattgcagccccttccttccaggctcaagtgatcctcccacctcagccccgggtagctgggactacaggtgtgcacgagcacacccggctaatctttgtattttttgtagacagaaggtctcaccatgttgcccaggatggtctcgaactcctgggctcaagcgacctacctacctcggcctcacaaagtgtgcacattgtaatatcgtgatttcatatttggagaatcagcaaccaaccagccaaccatgttgcttttataagacagagctgagaaagcaaagcttggctgtcgtcttggctctggtaccacccacgagatgcgggcgattctcagctcagggcgtggaggcgtggtgtgggggagtctatttgccatttttgtttgtcagcagggggcaggggttctcaaagattgcaaaatgctgctgcaggtcaggaaggttattttgggtgcctgtgggggaggtgaaacaaggtcccatgactgttttgcagaaccttgtctgtggagggtagaggttgcggcaggggcctgtgggccttacttggtgagaaggtaggtctagctggctccattcagtatttgagacatttggaatttgtctgcatttaaaaccaagagatcacacacacctgtctggatttggagtttctcttgaaaactcgccagtccggccgtctgagcctgcactgacgcctggtgaagctgtgcaggggccgcccctctccctttcaccacagtcctctccactccctttcgcctctccctggcctgctgcactcactgataggaaattctgaccccagactcggagcagccttcccgtggttcggtttttgcttccgcgaaaaagccaaaggccttggccagagagccagctgttcctacctctaccccacgcttccaaggcaaccttctccacttatcttaggccgagagacagctcttcaagaacgtacatggatcctgattttctcacgaagtcccgatggaaccctgtgctgttgagacatcagtgtgtaaaactctctgtgtccctgttgggctgtccagacagtctggactcttgtaaatttgagatttaattaaaggaaacaaaccaaataggactgcggaacaatttaaataaaagcacacaccagcctgggcgcagtggctcatgtcagttaaacctagtgctttgggaggccgaggcaggaggatcacttgagccaaggagttcaagaccaccctgggcaacatagcgagaccctatctctaaaaatatatatatataaggccaagtgcagtggctcacgcctgtcatcccagcactttgggaggctgaggcaggcagatcacctgaggtcaggagttcaagaccagcctggccaagatggtgagaccccatctgtactaaaaagtacaaaaattagctgggcatggcggcgggtgcctgtaatcccagctacttgggaggctgaggcaggagaatcacttgaacctgggaggcggaggttgcagtgagatgagatcgtgccactgcattccagcctgggcaacagagtgagacttggtctcagaaacagaataaaaaaataaaaaattatagccagtcagggtggcatgcacatgtggtcccagctatctggaaggatggcttggacccaggaggttgaggctgcggtgagccgagatcgcaccactgcactccagcctgggtgatggagcaagatcctgtccaaaaaaaaaaaaaaaaagcacacatatgcacacgtaaggtcagaggggaagctcctgtgtgtcccgagatgccctgatgtatgctggtgcatcaggccacccgggcatcatccttgatgacagccagggatccagaagctgtgggcgaatcccagctgaccaggagagagtccccctaccttggccagggtactggtggtaggcactgtttcccacggccttttctgcacaggaggccctggcaaccctgtcgtgctcatcttctgggccccgtggagcctcagagtcaagagctggaaagcctcctggccttggcgggggggtcttcagacctcagagcactgccattcttggtctaggggcccttcccgctgatgtgtgcggccgtcagtcctttcctcatgtggtggcatcaagtgtgtgctgggaagtcaaggctggctggttctttttcttttgagacaaggtgtcactctgtggcccaggctggactgcagtggcgcgatcttggctcactgctgccttggactcctgggttcaggcgattctcctgcctcaggctcctgagtggctgggattacaggtgtgccccaccacacctggctaattttaaaattatttattttttggtagagatgggggtcttgctatgttgcctaagctggtcttgaactcctggtgtcaagagattctcccaccttggcctcccgaagtgcggggattcacgggcgtaaaccatcctgtctggtctgtttttgttttttagtcact[131 bp omitted]aaacgctgtctctatcaaaagaagatgcaaaaattagccgggcatggtggcgtgtgcctgtagtcccagctacttggaaggctgaggtggcaagatcgcttgagcccaggaggtggaggttgcagtgagccgtgttacaccactacacttcagcctgggtgacaggagaagaccctgtctcaaaagaaaaacaaactaagggaaaccaatgccccaggctgcagagagcaggtcggccttggaacatcctcccgcgctggggcctgtggcagccacagaaacccgggtgtgaattcacaacatgtgggggacccagggacagcgagtgccaaggggggaagggggcaagttcacatacagccaccttgggatctagcgctttgatgcctgcagagaagtcccacccagagacaccgcccacccgcccacggtggggcagtgtcagccgcgtctgagctcctgacccgcaacggccagccgggagggcccaggctgtggggttgctttttaatgttcttatttatttaaatatgaaaaaacatttcatctcttcccagttcatctgaaaggaggtcccctgggtaaacataggaaagcagttctgcaggctcatgaaggatgctcggctggaggtcggggggagcatggctgctttccccagcatagcccccatgttccccaccctctttgtgccccggatctgcgatcctgagtccagaagagctcagcaggaagtgggaactgagaagctgttgggagccaggagggccctggaccctctgttctctgccccagggcttcagccaccctgcaagcccctccggacaaggcaacgtcagcccaggtagaaaacttaagagtccctcctagaaaaccagtgatgtgctggccctttcagggacacaggccccttcagcttcaccggagatgagaaggtgccacccgcaacagggctgctggtcacagctcagtgcgcgatgccttggccacaatcaccagcttggacagctcagctttgaatgccccgggcctgtgagccactgcaagaaagaaacacatggttgggccctcaacattgaaaattctcagaagtccggaggatttggggtggggcccatggtgggggctaagcaggcaaggggagcagtctccaaagcagactcccatgtgaaaaggccccaggcactgaaagtcttacgggtgacagacaggaaaacagtgatgtggagggtaaggtcggtggggctaacatagatggcaggcagcaggaagccacagaaagacctgaggtgggaagaaccctggtcatttgtgccatgttgtcaagaagagatgcagaaaggggccagaagaagcccaggaaggagatgatcccggcctgaacaggatgcagggtgggtcaggctgcaagacctcctgctcagtgggtgaacctgtctgaggccctcatgacacttctccagcagggtcagaactctggcttccactgcttcacccaagtctcccggccctacctgctgtgtccactcccttggctcccacccttgccccagctcggcgcctccgattcctctttctgcttagcattggcgccatgcagctgaatgtggcttgaggacaccggtgctgctcaggcaaccgaagaaggaccctgatgtttcccagtgacccctgcagcctcccctcggcatgccacagtcccaacctcaaagccctgatggtttctactttgttttatttcatttatttattttttaaaatttattattttttttgagatgagagtcttcctctgttgcctaggctggagtgcagtggtgcagtctcgactcactgcaacctcctgctcctaagttcaagagattctcctgtctctgcctcctgagtagctgggattacaagcatgtgccaccatccttggctaattttggtatttttagtagagaaggggtttcaccatgttggctaggctggtctggaactcctggcctcccaaagtgctgggattacaggtgtgagccaccatgcccagccctgtttattgtttttgagacagagtcttactctgatgcccaggctggagtgcagtggtgcgatcatagctcaatgcagcctcgacctcctgggctcaaataatcctcccacctcagcctcctaagtagctgagactacaggtacacaccaccatgcccggctaattttttttctttttgagacagaatcttgctgtcttccaggctagagtgcagtggcatgatctcagctcactgcaacctccacctcccaggttccagcaattctcctgaatagctgggattacaggtgcgcaccaccacgcctggctaattttttgcatttttagtagagatggggtttcattatg[141 bp omitted]ccaggctggtcttgacctcctgggctccaatgatcctcccaccttagcctcctgagcagctgcggtaacaggcatgagccaccgcgcccagctaagataaagttctagtggcacacagccacacccacgcatggacatactgtctgcagcagctttgtgccacaatggcacagctctagacagaacccacagtgccacaaagctgaagatattgacgaggtggcctttatagaatcagtttgtggatgcctggtctacagtctccaggacccctatggctgacccccctctccaaactgccccgattgcccacccttggatgggggtggcgtcacctctaccccatccccatctttccgtacctgctgttttggtcacttcaaattcctcagttttcagagggacatcactttccctttcaaatgcggctttagactgaaaaagaatgagtggaaactttaccagggccagttcaatgctcatcattaggaaaacgattgagtttgctttccagagaagcacagactaaagctttctacttttactagagatggagaggagacttttttgtttttgagccaggacctcactctactgtccaggctggaatgcagcagtgcaatcatagctcactgcagcttcaaagtcctggactcaagtgatcctcctgctgcggcctcctgagtaggtgggactatgggtgcatgccaacacgcctggctattttttttttacttttggtagatatagggtcttgctatgttgcctaggctggaatcaaattcctggcctccagcaatcctcctgcctcagcctcccaaattgctgggattactggcgtgaaccgccgcgcctggcctggagaagtcttttctggcatatacaagagaagccagcagcaacaggttaccaaacccccgtgcccctggcctgggggcgtctgtgtgccaggttcctgcaagttacacaccctacctctgcaggattcgctgtcccctctcctccctgtccccatggagccctcttgtggcaggacatctcacagctgccccagtgcacagaagccacacccggagcctgccccactccaagatactcacgtaggccatggcgtactcaatctcagcgccccgcacctctgccttgaactgtgtgaagtacagataggacttcccctggggcctgcagaggaagagggggcgagggagtcaggccaggcctgctgggtctgggtctgtgtgccctggaaggagccccgccagggactcgggctggggtcagcaggtctcgtgcctgcttctcaacatggacgccattcccgagcacgagcacctgctgactgggaaggatggatggggccctctcaacagcagaccctctttcttttgtgccagaatttttttttttttttttttttggagacgagtctcactctgttgcccaggctggatggcaatggcacaatctcactcactgcagcctctgcctcctgggtttaagtgattctcctgccttagcctcccttgtagctgggagtacaggcacccgcgaccacatctgactaattttggtatttttagtaaaaacatggtttcaccatgttggccagcctggcctgaacccctgacctcaagtgatccactcgcctcagcctcccagagggctgtgattagaggtgtgagccactgtgcctggcccctttgtgccagaatgttcttccagctcattcatagacacgcctctctcccctgtgggctgggagctgctctgggacaggaccccatgtccattcactgcacatggcttcttggttgctgacagcaatccaggtactacgacgggggctggggctgggcaatgagaggccagtaaaggcttctcagagggcattgactaggaagtacaggagttaacttaagaagtggggaggatcatctgcccaggtctctagaaggctgctaacggaggcttctaaggaactggagtggcagaaggtgtcggaaggtgacagcaggggatgatggcatctctggtgtgaagagagtgtgatggggatggaggggcagcaggggggccatttctgtggaagccctggctggggttctatgtgcatgggtggggcgggggtatccagggagccctagattcttctttaagccctagcactgccaacagccctggtcagggagggtccagtcactgtctgagatgaggaggcctggggtggcaggtctccggggctgagcatgcccctggggagcttttgtgggggttggacaggaggattcaggctcaaggtgagcccagccaccatcccaactgctccagacctgcacctgcccagatgccctctggggagctggcactcaggggtccatgcagggcagtggcctgcagacagacgatggcgaccgtgggcttccccaagactacagggcggcctctgcagggtctctctgggctgatggggcctatctcctctcaatgaccctcctgatgcctcctggggccttggcctgcctgtgatgcagccagttccatggagtgggtgagaatctccccagaaacacctgctgtttgtaaagcgccccgcagggcacggcgggacaacacccacacgaggcagcaaatcacaccctgtccttcagttaaacgtcgccactccctgatctctgcctcccatttgtcaacgtgctttaacctgaccgcagtggtggagctatagcttggacttctccctccaaagtgtctgcacaaaataaaggctcaagaaatacccactgtttgggctgagacattctgggccaaggatcagggaagaagggacaagattcctgaagcccccgaccccctccccaccggggggcctgacggcttccttcccttcatgaccttgcccagatcgagctgggatctaggcagtggggttacgagaatgagtggggcgagtggagccgggataagcccataaaccatgagcctgacagaggatggcggcaggggcagaatcgggcggtgtctggggagacttggggaggggctgtggacccagatgcatgtgtgttcgggcaggtggaagagagtgcacagcttttgtctgattcccagatgtctgcaccccaagaaggctatgagccatcaggctggtccttcagagaacatgctggtaaagacctgcctgaggggaaacagctggggccccttctggtgggacacattccccgggagatagcatcatccaaacctccacagccactaccccacagactcccacacctgccacctgcctagctcgtccccagcccagacctgcaccagctccgccagttccaccaggactctgcccagcaccttcctcctcctcctaccccagctagctgattccacagcctccaatctgtgccctcccctcctccctgtcctcattttacacagcctccagtctgtgccttcccctcccactccgtcctcattctacagcctccaatctactctccccaccccactccatcctcattctacagcctccgatctacattccccacccacctcatcctcattctacagcctccaatctaccctccccacccgtcctgtcctcattctacacagcctccaatctaccctccccacccgtcctgtcctcattctacacagcctccaatctaccctccccacccaccccatcctcattctacagcctccaatctgtgccctctccacccatcccatcctcattctacacagcctccaatctacgctcccatccaccccatcctcattctacagcatccaatctactctccccacctaccccatcctcattctacacagcctccaatctgtgccctctccacccaccccatcctcattctacacagcctccaatctaccctccccaccccatcctcattctacagcctccaacctgtgcactctccacccaccccatcctcattctacacagcctccaatctatcctccccacccaccccaccctcattctacacagcctccaatctaccctccccacccaccccatcctcattctacagcctccaatctaccctccccacctcatcctcattctacagcctccagtataccctccccacccaccctgtcctcattctacacagtctccaatctgtgctctccccacccaccccatcctcattctacaaagcctccaatctaccctccccacccaccccatcctcattctacacagcctccaatctgtgccctctccacccaccccatcctcattctgcacaggcttcaatctgcgccccacccccaacccccgactccatcctggttggtgcctggaggggctccctgcctcagcctgcctccttcagccggggggatctgagctccacatgttcctgcagggagccctctggaataggactcagccaggaaaagaaatgaggctgacacgggcctcagcatggatgagccttgaggacgtcacgttcagtgagagacgccagacaccaaaggccacacagggaaggtttgaccccatttctatgcaatgtccaggacacgcccatccacagagacaggagggggatgcgtggctgccatgtgctgggaaggagaatgactctgatgggaacagagtttattttcaggggatgaaaatgttctggaagcagaggtctggctgcacacctctgagaaagtactccatgcagctgaattgtgagcttaaaatgctgtgctttatggaattttatctcagtttttaaacattgccaaaaagggtcaggcatggtggcacacgcctgtaatcccagctactcaggaggctgagggaggagaatcgcttgaacccaggaggcggaggctgcagtgagccaagattgctccactgcactacagcccgggcaaaagatggagactccatctcaaaaaaaaaaaaaaaaaaattgccaaaaagccctttggtgagttcgtctcacccttaggggagggtggagccccttggggccttcctgggccctggtccacgctccgcaccctctgagctgcttctccttttcctgggaccttgccccgcacaggctccccccgtctcccccagaccttctcagtctctgcatcagtgcacttccttggggagcactcccaccccagcgaccctgccaccccccacctgcacgtgcatgagtctccctgctggtctgtcttcccctccaggggtgcagccctcgttccctgccttccaaagcagctcctgaggccacagggcaggccaacggcagccggaaatgccatccccaccccgagtctcacctccagatggtgcaggtgaagtgctggtggtcttcgctggtccccagactcatctgccattgctggggagagaagacagcgcgggtcagccccggacacacagctgctctcggagacttctaggtgtgcctctgattctacagtcaggccacctcttctgtacctcccgattcaggggctggccactaaatcccctgccccgccctcctggtggcctggggtttgctgtcatctgtgatcagggagcctgcctgcaccacatccttcccataaaagtggtgcctctaatgagaactaccccaaagtggctcccacggatggggaaataggaacaacgctgtttgtttgtttgtttgtttgtttttgagatggagtctctctctgtggcctgggctggcgtgcagtggcacgatctcgcctcactgcaacctctacctcctgggctcaagcgatcctcccacctcagcctcccaagtagctgggaccacacccagctaatttttgtgttttgtagaatcactgtcttgccatattgcccaggctggtctcaacctcctggcctcaagcaatcctcccaccttggcctcccaaagtgctgagattacagatataagccaccatg[145 bp omitted]aaccccatctctactaaaaatacaaaaaattagccgagcgcagtggtgggcgcctgtagtcccagctactcgggaggc[175 bp omitted]ctatcgtgagatacctttttctcccaggtcagaagggcaaaagccctcctgtctgctaacacaccatatgggtgtgaaaaccaagactattccaggttgtcggtggagctgcaacaggtacaagcaaaatggaaaatgcaggctgggcatggtggctcatgcctgtaatcccagcactttgggaggccaacgtgggatgatcacttgaacccaagagttcgagaccagcctgggcaacatagcgagaccccatctctaaaatgactggcctcttgcacgatgttaccaccggggaacctggttaaacggtacttggatctctctgtaggatttcttacaagtgaatgtaaatctaccatgatctcaaaacatacagttttacttttttttttttttttgagatggagtctcgctctgtcacccaggctggagtgcagtggtgcgatctcagctcactgcaacctctgcctcgtgggttcaagcgattctcctgcctcagcctcctgagtagctgggattacaggcgcgtgccaccacgccctgctaacttttgtattttcagtagagatggggtttcaccatcttagca[133 bp omitted]gggtggttttcccacagatgtaactgcacttgtacaatgaaccctggccaaggttattcacggactgggttggaagtaaccctcaatccattagtacgggattgtcaactccacacgtccatgcaactgaagcgctt[132 bp omitted]gaaacccatctcaaggtgttgaccgggctaggctcttactggtagctcaaggtcctcttccaagctcttgtggttgtggcagatttcagttcctcttggttgcgggactgaagtcttcatttccttgctgccagccagaggctgttctcagctcctagaggccgcgtgtattccctgccctgcag[153 bp omitted]ttcacgccattctcctgcctc[212 bp omitted]gacggggtttcaccatgttggccaggctggtctggagctcctgacttcaggtgattcgccagccttggcctcccaaagtgctgggattataggcatgagccactgtgcctggcccaaatcatctttactggctcttctgccaccagctggagacaacagccagcaaggaaaccgggaccttggtccctgaaccacaagtaactgaattctgccaactaagagcttgaaggagaggattcttctcccagcccagagactttttttttttttgagacagggtcttgctctgttgcccagtagcacaatcacggctcactacagccttgacctcctgggctcaagcgatcctcccacctcagtctcccaagtagctggaaccacaggtgcacgccaccacgctgggctaatttttttattttctgtagagatggggcatgagccaccatgccttgcctgtgatacctttatttatttattatttattttttgagacagagtctcgctctgttgcccaggctggagtgcagtggcacaatcttggctcactgcaacctccgtctcctgggttcaagtgattctcctgcctcagcctcctgagtagctgggactacaggcatgtgccaccatgcccagctaatttttgtatttttagtagagatgaggttttgccatgttggccaggctggtctcgaactttgacctcaggtgatctgcccgcctcagcctcccaaaataccttgagtttggttttatgaagcacacaactgagctgacccagacttctgacctacaaagctatgagataataaatgggtgctgttttaagcccctaagctgtgataacttgttgcactgcacataaaatacaacatcccaacagatgctcatggggatggcagactcccatctcccctccctccttctgtccagacatttgcttgctctgtagaataataacagcagaatctgtcgtcactgtttaatgccaatactctccctttttattggtttaggaagagtcattcaatgagtgtaaggtgatataggtgagacccaaccctgctgtctgctacagaacatctccctacaacaatggatactgtcacagtaagctagagggaattttgaacaactcacctcattggtccctccttgagaggcgtaagtgaacatacacgtatatttgtcctagagaatggaaggaaaaaaaaggtttggtagaaggaaatttttattttgtttaagagacggggtcttgctgtcacccaagctggagtgcaggggcacaatgacagctcactgcagcctcgaactcccaggtttgagtaatcctcttgcctcagcctctcaagtaactgagacaataggtacgcaaccaccacacccgactaatttttttttttttttttgaagcagagtcttgttctgtcgcccaggctgaagtgggatgatctcagctcactgcaacttctgcctcccgggttcaaacgattctcctgcctcagcctcctgagtacttgggattacaggcacctgctaccacacctggctaatttttcgtatttttgtagagatgggttttgccatgggacctggacaagtgaaaacttttctgagcctctagtttctctctgtttctcttttttatgtgaagcattttctcatctgtaacttgggcctaacatataaaggacttggcatcacacctaactataaggaagtagtcaacaaactggcctggcacagtggctcacgcctgtaatcccatcactttgggaggccgaggtgggcgggtcacctgcggtcaggagttcaagaccagcctggctaacatggtgaaatcccatctgtactaaaaatacaaagattagtagtcccagctacttgggaggc[136 bp omitted]acacgtctgtaatcccaggtactggggaggctgaggcagaagaattgcttgaacccagaaggctaaggatgcagtgagccgagatcccgccactgcacgcaagtctaaaaagaaatagtcaaaaaacagtaaagatactgttattacaggcggggaaagggaggctgagaggggaaaggactttgccgacaagctgagtacagggctgagggcccggcctcacaccctcggtgaggggggaccttgtgcaatggaaggaaggagcacttcctccctcttcggagctgcagcgactgatttccttcaggcccaggagggcagatgccctttagcctcctgccgctcccatcactgacccctccccacctctgcgtctggagggcaggggtgcctggacactccaggcaggcgacaggtgacaggtgatcacgccccctcaacgccgccggggcccacaaggccccgctccctatgagttcagtcctgccccagtgatgaccccggcctcacggtcccgcgccccccactcagcctccgaccctaacaatccgcaccccttcttcagtacccacctccgcggtccgcgccccctcctcgggccccgcccccaatgctccgcgccccctccccgggcctgccagcactcaaatatccgggacggcggtggcacgtacccccgggcccacgttatgggagaaggaatgcacgacgccgccgggccgcacgtcaaacgccaccgtcgtgggctcggacaccgcctccgccggcctcagcgccacggcccctaggagcagcgcggcccacaagctcgcgccgacgccgttccaccctccgctgggcgccgccatgttggactagggtcctcagggcaggggcgggtagacggggcgcggcgagggacacgtggagcgtccgccggaggccacgtcggcgtcggctgtccacgtgacccggcacgccccgccctgtccaccgcccggggccaccatcttgggggcgggactttgtcgagggggcgggacttttgccgagggggcggggccgccgagggggcggggccgccgagggggcggcctcgtaccctagggaccctgcgtagcccggcgatccttggagggtccctcaggtggtaatggagttcgttttggggtctcagggtccctcaccagccgtgtgactgactgcagctctttcagttaggagatgtacagggagtgagggaaatcgaaggtcaccattaggcgaacttctcataatcgttgcagccaagatgtgtgtgcatcgatattcaaaattagcagagggaaagtaggatgagaagcaggatgcttgcttttgtttccctcttgttgcccaggctggagggcagtggcgcgatctcggctcactgcactctccgcctcccaggttcaagtgatgcacctgcctcagcctcccgagtagctgggactacaggtgttcaccaccacccctggctaatttttgtatttttagtagagacaggttttcaccatgttggccaggctggtcttgagctcctgaccccaagtgatccgcctgcctcggccttccaaagtgctgggattacaggtgtgagtcatcacgctcgatcagtctgtgtatttgttaataggattatgtgggtgttcacttcctggctttgataacctggcttgtcctaggggttacagacgatgttcacattagggggagttggatgaagcgtattaggaaaccctacagtttctgcagattttctgggaggcaaaaattatttcaaaataaaaagttaaaaagaaaataatccctacctcaaggagttgttgggaggagtaagtgagggaattaagttcccacaccgggacgaatgaactgagaattatatattgtagctattgctatcattagatcccaggttttcaactagagaaggaagtcattctttggttacaaatggcttaacatttcaagaaaacaccagtggccaggcctggggggtcaataattaagctggtgtttctagtccttcccaactggcaaaaaacagaatccagagagaaaacgtcatagatgactcctaagatgggttataattcaccctttgaggaattaaatcactctactccatagctacggagggtggtgagccccagggaggtgagaaggatccccgtggaggctgactcctctgccaatgacagaagtccaagccagttgcctttctgcagtggcagcctgttctaaattgggatacctgcttgcgttaggaaatttattggccgggcgtgatacttcatgcctgtaattccaacccttcgggaggccaaggtgggtggattgcttgacctcaggagttctagaccattctgggcaacatagtgagaccccattcctatatatatattcatatattcacatatgtgaatatatatattcatatattcacatatgtgaatatatatattcatatattcacatatgtgaatatatatattcatatattcacatatgtgaatatatatattcatatattcacatatgtgaatatatattcatatattcacatatgtgaatatatattcatatattcatatatacttatatattcatatattcatatatacttatatattcatatatatgaatatatattcatatattcatatatatgaatatatattcatatattcatatatacttatatatatattcatatattcatatatacttatatatattcatatattcatatatatgaatatatattcatatatatgaatatatatattaatatattcatatatatatacttatattcatatattcatatatatacttatattcatatattcatatatatacttatattcatatattcatatatatacttatatatattcatatattcatatatatacttatatatattcatatattcacatatatacttatatatattcatatattcatatatatacttatatatatatatatttaaagatattttaagattattttttaaagatagccggacatggtggtgggcgcctgtaatcccagctacctgggaggctggggcaggagaatcttttgaacccaggaggcataggttacggtgagctgagatcatgccactgcactccagcctgggtcccagagcaagactccgtcttaataaataaagaaataaacaaacaaatctcttcctccatgcagctgtctgttctggacccatgagacactgtctccataaactggacaagcacagagcagccctgttccttaggtgagtgacacagcacggttccactgatggagtccccattaccttaccacggtgttcaactttcagcctgtcaccatgaaggattcgatgcatggccgagctctgcggctaacaaggaatttcagttgtgagctgttgggagtctgctacggaacccaggcaggttgtgcgtatgcgtgtgcatgcgtgtgtgtgttctttccagaaaggtttcggccccaagtttcacccacccaccacaaatcatcacactaaaaggattaaaagaaaaaacaaggctggccccagtactttgggaggcagatcactttgagctcaggagtttaaaaactgcctgggcaagatggcaagacaccgtccctataaaaaatacaaaaacattagctgggcatgatggcttgtgcctgtagtcccacttacttgggaggctgaggccagaggatgacttgagccatggaagcagaggttgcagtgagctgagattacaccactgcactccagcctgggtgacagagcgaaaccctgtgtccaaaaaaaaaaaaaaaaaaaggaaagaaagaaaaagaaaagaaaacaaggctggacacagtggctcttgtaatctcaacactttgggaggccaaggtgggaggatcacttgagcccaggaggtcgaggttgcagtaagctgtgattataccactgcattcctgcctgggtgacagaggagcaaacaacaaattattccacggatcccactaatcatgatatgaaatctgtcagtcctaaaggacaagattcgatcacacaaatattagattatttatttatttttttttttaaatttgagacaaggtcttgctctgtcgcccaggctgaaatgcagtggtagtttcagctccctacagccttaacctcctgggctcaaatgatcctcccactcagcctcccaagtagctgggattacaaggcatgcaacactcacccagctattattattattatttttttgtagtgatggggtttatgccatgttgctgtggctagtctcaaactcctgtgctcaaatgattcacccaccttggcctcccaaagtgctggcattataggtgtgagccactgtgcctggcctcctttttgtgtgtgtgtgtgtctgtgtgagacagggtctcactctgttgcccaggctggagaaacctcctcagctcactgcaacctcctcctcctccagggctcaagtgatcctcccactgcagcctcctgagtagctgggactacaggcgtgcaccattgcgctgggctaattcttcaatttttagtcgagatggggtttcaccatatcgcccaggctggtctcaaactcctgggttcaagtgatctgctggcctcagcctcccaaagtattgcgattacaggcgtgagccaccacacatggcctttttttttttgaggctgatctcaaatgcctgggctcaagccaacctctcgccttggcctcctgattagctgcgattacaggtggaggccactgtgcctgagtcccctaaatatcattttgtactggaatttttttcttttttatacttcctttttgatgttgttgttgttgttttggagactagggtcttactctgtcacccaggctggagtgcagtggcatgatcacagctcactgcagcctcgacctcccgagactaaagtgatcctccagcctcaacctcctgagtagctgggactgcaggcatgcgccactacacccagctaatttttgtttttgtagagccagggtttcacaccatgttgcccaggctggtctccaactcctggactgatgcaatccacccatcttggcatccaaaagtgctgggattacaggtgtgagccaccacgcccggcctcgtatgtttttttaagcccccccccccctttttttttttttaaaaaaagtggaaatttccaaaggatggagcaagtggataagcagggcagtccatccctgctgttagaaatggagcccacatgccccgcacgttgcaaacagggtctgctgggtgtcttggctgctgggacgatgtgaggagggccttggcctgtcgtggtcctcagggtgcagagtctcaggtagaaaaggaggtgttggctgggggaggatccagcatggaggatgctgtaatttgggttgtgctgaggctctggggagcccggggggccagtccaggccacacacgacagccagagctgagtccctggagaccggtagaccttcctagaccagcgaggacaggactaccctcatcaggtggctggggccatcctctgtgggtcagtctgatcagggcatggtgcccaggcagccccagcaccccaggagtccccacagatggcagtgcccttctgccatgtcttgtctgttgccccccggaagcccctcccactcaggagccccaggacttagaaggaacctcaggcaggtgacatgtttccaactggaatcgtttaatgtgtctacttcttccacgcataattataaaagaataagaatcgacaaaaatattttctttccataatatgtagaggtggtttgtttcttttttttttttttcttttctttttacttttttttttgcccgcccctggcagagctcttggcggggagggaaggggagagggaaatataaccctgaggtggggatggttcagctcccaaccccggaacccctggtgtgtacgggtcaggcagacacatgtggctgggcggctgggctggggaggggacagccgccactgaccagcagagcgtggaagttcggtgcgtttcagtgcctgcctgaaagcttggggacaggagggctgtccacaggtggtgccccccgcgggccctggccgcttctcctgtggggcccgcatgaccctctgctcgggcttgggaagaaatggagcctaccaggtgctgggttgcaaccccgctgcccggtgtggaccccaagtctagatttaggcaccccttgctttctgtcttttattttttatttattttgagacagagtttcgctcttgttgcccaggctggagtgcaatggtgcgatcttggctcaccgcaacctccacctcccgggttcaagcgattctcctgcctc[131 bp omitted]gcctcagcctcccaaagtgctgggattacagacgtgagccaccgcgcccggcctgtcttttaaataattatgaaaaatatccccccaaacaaaacacaaacatcaagttggggaggctggccgggggggacaggcaattgcatgcttgggtgctggggacggtggctggccgggccaggggactgagaggtcacagggagccccaggcggaaggcagcccgctcctctgagtctcttctggcctctccagtgcccatcagcgtgtgacctcctcctcccagaaggcggggagaggaggggctggcccgagaccaccatctctctgtctcggcaaccaagaagcagcggacataaaacccaagagcgtttaaaaaaggataaaaggcgtcggggcggtgaaggcagcggctcctcggggctggccagcgctgggcgggacaaagtgcctcactggggcccgcgggccactcagtccctcccgcctggttccccgcggaggctgcagccacttgtgctgtgatgtggcggctcccggtgggcaggctcagaggtattcctgtagaaagtgcagcaacgtgacttcatagtgctcgcccgactcggggcagcgaatactgtgtctctcgttggggtagatctgcggggagacaggaggcagggctggggggcgtggccggaccacccccgtgtcctaggctcctcccttattctggctcagggcatccgggaaggcgcaggtgctctgaggcccagtgatctgggtttgaatcccacctcggctgttgacttgcagtgtaactctgggcctctctaaaaaatggggtgaatccggacctcacagtctttgggaggatttggtaagacaaagtttacaaaacgccttgcggtgtgcacgcgcttgcacagaggaaagatttaggaagaaaccgtttgcctctttcccccaaaccggctgacgggcgaccaactcatctctgtggaggtggctgaggcttcaagcctcagggacatctggtgccctggtctcgagccatttccactttaccaaaaggcatgtgactagctctgggccttaggacagctgcctgtgaggatttgtgaagcattttctgggtcctcttagcgcccaagggggatcaagccaagaggcaggcagtaacatggaactccccaggctcctgagacctggaccagccaacgccaggcctgggggtggatccacacggggatgcaggtcctgcctctggccacgaaggagggctctcgaggcactgacggacaacccctatagctccccactgccccctaggggttggtaggaccaaggcatgaaaataaccctacgttctccacaaagaaccccggggctggccggcagcaggggcaggtggcccatctacgccacctcctgccagtgagatgggtttctgaatcatcccctcctctccaggctcctggtccccactgttgcccatcaccctgggaatgcaccaagccacccactggtttcccctcctctactcttgccttctttaatccatccctggatgaatcacgagtttgatgacaccgtccccagcctagacctctgcaaggacttgccagtctgacatcaagaccagcttccaggtcctgctgccccaggcacttcaagggcccactccttccccagcccgggcagtggcactccctggggcagactctgctgcccttgacaccagccatatgcacatgttgtgcccatgcctttatgccactctgggtcccagctgcctggttactttttcctcttggctaagagggcagatagagggtctgtctggctccccaatgagcttccagaccaagcccaaggcccggcatgtgacaaatgtgatttgtgtataaagagggcctggggccgccagctgcctggcccagatgttttggggtctttgaaacagaaggagaggtgcactctatctgtcccacacaatgccatgttcccaccccacagcctatctcatctcacgttctacttcctgtggggaggcagtgagacaggaccctgggcccaccctgtgtgctgaatgcttttcttttttctttcttttcttttttttttttcttttgagacggagtctccctctgccgcccaggctggagtgcagtggcacaatctcggttcactggaacctccgcctcccaggttcaagcgattctcctgcctcagcctcccgagtagctgggactacaggcgtgtgccaccacactcggctaatttttgtatttttagtagagacggagctttgccatgttagccaggctggtctcaaactcctggcctcaagtgatccacccgcctcagcctcccaaagtgctggggttacaggcgtgagccaccacgcccggcctgaatgcttttctgaagaccttgtttggccccagcagccttcaaggaggccgagttatcatgaccgtttcaaagacggagaaacgaggtgcaagggtgaatgctgtcccagctacctggcccctgggaaggcagtgggctcgggtctcaggctgggaagagacatctgaagttccattccagccctgcctgatatcactccctgggctgcttgggatgtggggtgtcggtggggggcaccgccaagagatcagctcatcaccgcacaaggtggctctgcctccctcctgctctgcggccccatttccctgctctgttgaaaggcaacaggacgctccccacaggacagagcatgccgaggcgcccaggaagcagaaattgtctgcagtccacaggtaataaaacctggccctcttgcctccaagatacctcctgaatctcccgccggtacaactatggaccacgtcccactgtcccccacaggccatccacaaagcagccagagaaatgtgggtcaaatggcaagccgcccaactctatgctctgctcacaagcccgagtcacctcccaccaccctcagttgaaaatccagccgaagccccgcccccgctgaggccccacccctctatagcagaagctccaccctgcttactgagggccccccctcctctacagcagaagccccaccctcctcaccgctgaggcgctgctcccacaccgagccccaccctctccactaccgaggcccttccccacaccgaggccaaccatttactgcggaagccccacccaccgtaacactgaagccccgtccctctgcagaagtcccaccctcctcgccattgaggccccgcccataaccatgcccaccccttagcgcagaagccccgcccacctagactgagccccacgttgctgccaaggctccacccactcccccactctcctcccgctcggtcccccaagcctggctggctccactcactctagcacccttcactgctgcctcctcagggaatgcttggccccagcgccttaggaaggagcctgctagggccttcagcactcagcggtttcttctacgcaatttctcagtttcaaataaagcccgtctgcggggcaatttcggtaagggttcctccctccattaggcccggagcaggggtgggtgtggcagcccccgatcccgtgcttccagcaccgaaggcaggcggaaccctgagctgtcaagacaggactgatacatcaatggccctgggagctgggagggcggggacacagggctgtggggtggggggctgggagccccagatcccccagggagcccctggtcacagtgggaagccaccccgcctcgtcccaccccccactcccagggatctgtcggctcgcggaggggccgaagcccccaacagccacccacctggagctggtaaggtttccctgctcggatcagttgggagacgaggaagtttgtgtggaaaaagtgcacgttttcgtccaggaagccgtggaggataagcaagcggttgggcctggaaaacagatggggaagggtctgaggccagggattgtccgtggggtaggaggggagcagatcacaaggtcaggagtttgagaccagcctggccaacatggtgaaaccctgtctctactaaaaatatatttaaaaaaaattagccaggcatggtggcaggtgcctgaaatcgcagctacttgggaggctgaggcaggagaactgcttgagcctcagaggcagaggttgcagtgcgctgagatcgcgccactcactccagcctgggcgacagatggagacagcatctcaaaaaaaaaaaaaaaaaaaagatcagctgagtgtagtggtgcgcctgtaagtccagctactgtgcaggctgaggcgggaggatcacttgagcccaggaggtggaggctacagtgagctatgatcataccactgcactccagcctgggtgacagagcaagaccccatctctaaattagaaaaacaaaaacaaaaacccaggccgggtgcagtgcctcatgcctgtaatcccagtactttgggaggccaagctgggtggattgagtccagttgtttgagaccagcctgggcaacatggcaaaacctcatctctacaaaaatatttaaaagttagccaggcgtggtggtgcacacctgtggtcccagctgagcctgaggcaggaggatcacctaaaccctgggagggtgcagtgagctatgattaaaaaaaaaaaaaaaaaatgctgagcatggtggcttacacctgtaatcccagcactttgggaggccaaggcaggtggatcacttgaggccaggagttcaagaccagcctgggcaacatggtgaaaccccatctctattaaagatacaaaaattagctgggtgtggtagtgcatgcctgtaattccagctactgaggaggctgaggcacgagaattgctttaacctgggaggtggaggttgcagtgagctgagattaagccactgcactccagccgggaccacagagtgagactctctcaacaaaacaaaacaaaaacccacctaggtctgctgctgtctgtggtctggagtgtggcatgggctactggtgaggccaacacgcagcctcaccagaatcggctgccctagcccttcctgtccgatacgggagccagtggccacacgtcgccgttgaaattccagtttacattcatccaaattaacggaacttataaacccattgagacagagcacagatcggtggctgccccgggacagggagtgactgctaaggaatgggaacagggtttgacgctggagtgctggaaaggttctggaaccactgcaaatgcaccgagggctgctttaaggtgactgttaggttctgtgaatttcaccacaataaattattattttttgagacagagtctcgctctgttgcccaggctggagtgcagtggtgcgatctcagctcactgcgacctcacccttccaggttcaagcaattctcctgcctcggcctccttgagtagccgggattacaggtgtgtgtcaccacacctggctaatttttatatttttagtagacatggggtttcaccgtgttggctaggctggtcttgaactcctgaagccaccgttcctggcctattattattattattgttttgagacagtttctctctgttgcccaggctagagtgcagtggcacgatgttcgctcactaccaactccacctcctgggttcaagcgattctcctgcctcagccttccaagtagctggcattacaggcatgcaccaccatgcccagcttattttttgtatttttttgtagagacggggtttcaccatgttggccaggctggtctcgaactcctaccttaagcaatcctcctgccttggcctcccaaagtgcccaggcagacttttttttttttttttttttttgaattggagtctggctctgtcgcccagactgtagtgcagtggcgcacgatctcggctcactgcaagctccgcctcccgggttcacgccattctcctgcctc[132 bp omitted]tcagcctcccagagtgctgggattacaggagtgagccaccgcgcccggcccatgcccaggcagatttttaaccccctaggtgactgcatgggattccggggaacattttctggagacgtgccagaaaatgggaacactgttttctctccatcagagaataagacccatgtcaaaagcataaaatgggacatctgagctggtccctggccctgtggacatctatgtcctgaagcacaagacagaggctgtgatggggcctccagcaggatgcaggggagtgggggaggcttgcctgtgaaaagcagtgactcgaattccctcatctttcccagggcagggctgtgagcctccttccccagacaagcatccctgggtgccccttcctgcaaggtgcagtgaggagggagggtgggctggaggggactgtgaggcacatgcaggcagacgccaccacaggagcacagcggggaggctccacatggcctgaggctccctgggcagggccagctggggcaggagggcaccctcatagagacagctggtgccggggtgcaggagaagccccggggaggagcgcagggcagggcagtggccttactcattgggcagcttctccacgtgcagggccacggaacccgcctcatagccgtgctggttgttctcagggacgtccatgtagcgctcagtgtaccctgtgtcgtaggccatccagacggtgaccggggcacccgcgatggccacctgagggacacagcagacagatgggggcagagagagagagagaaacaggcgtcgggtcctacagccagcatcagccgctgtcccggggccgccctggagcccgtgaggagcgctcatgcacatggggccggcaaggaaggggccctcagaccgcgtggcccccgtggacggtgcgtggcatgggggtgggcagggcgccacaggcgggcaggtgcggcccctccccgccgccgcagagggccgggtcccactgcccgtctgcctcctcctcctcctcatcgccgccgccccgcagtgccctgactgccgccggcctggggcccccccgccgctctgcacaccatgccccacctctgcccatccgaggccggggtcccgggctcagcctcccacagagagctgctggcggggttttgtgcagccggatgccatcctgcggtcggcggtggcgggcaatgaggaggggggctcggccccgtggggctgctgcagggagaaacagccacgtggcaaggcccctgccgaggcgcctccccggtaggtgggctccgggtggcgcgggcggtgggcaaacgcggcgtagatggggaagggggcagggaggggcgtggctgaggccggccaggggtgggacccaccttgaacacctggggcttgtggattagccccatgagcgagaggaagcccccgtaggaccagccatggatggcaactcggctcaggtcgatgaagccatacttctcggccacgaactgcaggccctccacctggtcctcgatctccacctggccctgagggatgaagccgggcacctctcagtggcctcctcccggtatgtccctcccctgcagtgacacctctgctcctttcagggcgtctctccctcttggatgaaaagtggctcgctggaagccccctgtccttccaggccctgctaaccctgcctgctatctggggatggctggacagatccagcagccatcttgctctgccacctcccaggtgagtggctctgggagccacgtcccctctgagggcgtcagtttgcccatccctaataaagggacattaacaggaagaggacccattttctagagggcacaaggaagaaaaagacgggtgcccaggcatgtgcaagggcacaaagaatggctggtgccatcgccgttgtcactaccagccacatccccaccaccgccactgccacgatttcaatgctggtgtcccctctgaagtccgtgctgagatcactactgcggccttcaagcgactgatccatggggcccactcatgtgaatgggatgaggggcccttataaaagggcctgatggagggaggccacggcttttccgctccttgcaacccctctgccgtgtaggaagcagcacagggcctctctggagggttgctgaccaggcaacctcgtgggaacagagagcagccctccccgacacagccctgccttggccttggacctcccagcctccagaactgtgagagattttcgttctttataaatccccaggctgtggggttttgttccagcagtgcaaaggggccgagatgatcgccatcaccaccgtcgtcatcaccagtgtcagcacaacttgtctctgtccctgcagggcgcagcccagagctgagcagcaaagcatacatccccttttgttctaaaagggcgcctcattgagcctgcgtcaccccagccagaagtgcccttctgcgggtggtattccagagccgctcccatgccctgcacccacacggcccagggctcccttcccgagacccaaaggacccagagcaacagggaggagttgttaccatttggtttttcagggccccttcgaaccgaagccctcgctgacaggagcccctgccgtcaatcacaaccacggcgtagcccagggaggccagtgtgttgagccgcaagtacttgatgcctttgaaggagttattcaccagctgcacctgtggggaggtgagggccagcagtccagcacgagatgccgggcaggacgggcctggcaggggagatgccggtgggctggggaccgggccgggctggggcctcagagcctaatgaaagcacctgtgccccggaggctctggatggacacctgggagtggcaaggcgggaggggcccatactcgggaccctgctagggagggggaagggccactgtcaggctctttctcagctgggccactgccccagtcctgcctggaacaactactctggcatgatggacattggggtggctccttctcgggtggggccatctgggcactgcggggtgctgagaagccactccaggccaggagaactcgcagtggtgatgaaccacaaagtacccagacatcgccccgtatcctctgtggggacagagctgctctgggtaagatgtgcgcctaagatggtccaactgccaatctgctgcctgcttttgacccctgctccaggaattgggcccagggcccatggccacctccataccaacctggagactaggggacttcctagaggaacaagggagagtcagcaggcggagggggaaggggaggccatccaggaagggcggggagcgtgcaaacgggcacagagaaaggagggtgaggggccccgaggaccctgtgtagtcagggcaggcggggtgggctggggcaccaggcaggtagccggggagcctcctctggttgactgttctacagctggcacttgagtggggatggggagtcctcgggtggatggtggggtgggggcctggggagcaggtgtgcactcacctgggggcctccatatacaaagaggacggtggggtgcttcttccctggctgcaaggcgtggggcttgtagatcatgccgtagagccgcacatccgagcgcgtgtggaaatggaagatctctggaggaacataatccggggggcagcctgcgggagacagggcggctatctggctgcccggggaagccacatccagctgacacccttgttctcctgcccaccccaagccttggagggtggaccaaagcaccccctcttttcctgggcttcccgagagttgataattgaaaaaaacgtttttttttcattaaataagatttgtacagtttttgtagagatggggtcttgtctccctgttgcccaggctggtctcgacttcctggcctcaagcgatcctcccacctcggcctcctgtgtagggtcactgctatttttgcaaagcaacagttgttgtccaattaggatggtgggggtttttctgttttttttctttttcttctttttttttttcaagacaaagtcttgtgatcttggctcactgcaacctccgccttcctgggttcaagcgattatcctgcctcag[134 bp omitted]cggagtctcactctgtcacccaggctgcaatgcagtggcacgatcttggttcacggcaacttgcacctcctgggtttgagcaattctcctgcctcatcttcccaagtagctgggattacaggtgcgcgccaccacatttggctaatttttgtacttttagtagagatggggtttcaccatattggccaggctggtctcgaactcctgtccttaggtgatccacccacctatgtctcccaaagtgctgggattacagacgtgagccaccacacccagccatcgaactcctgaccttgggtgacccgcacaccttggcctcccaatgtgctgggattacaggcgtgaggcactgcacctggcccaaagttttttctttaaataaatgtatgtaggtaaattttggtggggcaatttataggaaggtgagtaaagggtactacaggtctaggggtagcagaagtttactgtggagggccagatagcaaatatattgggctctgggaattgggcgtggcgggacacgctccgtgctgtgtctctgtgtcatctgctgcggtagcgctaatgtggccacagaccacagagggactgcacgtggctggatttggcagcagttggcctgctcctaatgcaggcagtcttcaaacgtggcacagattgggagtttcgggaaacagtgcctcgttccccagggcactgaggttctggtctctgcccccactgctaggctgggtgccctgctgagccccttcccctccctgacccatctcctcatctgaagccagggctccagctcctggcggtgtcggtgcggacaggagagtgaggactgggctctagagggaggcctgggatctgtttctgctcaggggtgagggcatcacaaaatgctttccagcccacggaataccccgcatatgctggaaattcgttgtgtttagaatgttctggaaacccaccaacatggcagagacagggccagggtgggttgtccttgtactgagtgatgcctgggagcccagcagtgtgctgacccgctggttttcatcccacactctgtatatacagtttcgttgataaagaaacacttcatggtgatacgctgatgtgtgtgacggagccagcactggaacccggagtcaccaatgcagggtcctggccaacttccaggttctgggcaaggtgtcaggttgcctcatttcctgaggcccccctgtgactgaccctttgctccttttcctgataaaggcctcggagtgtcggctctgagcaggtgctgctgtgggcggcagcctctgggcacaggacaccataaagggccctctgcatgccgctgtggccaggactgcagggtcctggagaaggtgagtggaaagcctgataaccacggcgggtttcaaaccagtgtgggtggactctgacatcccggccacccctgcatggaccaccactgttcaaaaggttttttttttttgagacggagtctcgctctgtcgcccaggctaaagtacagtggtgcgatctcagctcactgcaacctctgtgtcctgggctcaggccattctcttgcctcagcctcccgagtagtgggactacaggcgcccgccaccatgctcggctaattttttgtatttttagtagagatggtgtttcaccgtgttagccaggatggtctcgatctcctgaccttgtgatccacccgcctcagcctcccaaagtgctgggattacaggcatgagccaccgcgcctggcccaaaatgtttttaatttttaatttttttttagagtcagggtcttgctctgttgcccaggctgaagtgcagtggtacaatcacacttcactgcagcctccgacttctgggcacaaatgatcccccccatctcagtctctggagtagctaggactacatgtgcacactactacacccggctaatttttaacatttttgtagagggagttcttactatgttgctcaggctggtctcaaactcctacgtgcaagcaatcctcctgccttggcctcccaaagcattgggattacaggcagaagccactgtgcccgctgatgaaaatgtttacttgtcacctgcccactaccctgggagctcccagtgacagggtctgtgtctcactggttaccattttggcagggggttggcacggagctgcatccctgccgggttctgtgcagtccggccctttactgcagctcgaacccaggaccgtctcggacggcaggggctgtggcttatgtcctatgacgagttcccagatgcttggaggggcctgggtgctgtgggaggccaggcaggccagctccaggcctctgcctctttccccagcatggggccctcgtcccgttttacagccgggcgggcggaggcctccgtggggcggggcaggggctactcactggctgcctccatcatgctagcccagaagcggggctgcttgtgcagggggtcgtcgtcggggccgctcagcttgtagacgtgcacgcagggcggcgtgctcacgctgctgtagtggctgacgaacatgtcgaagttctgggggtggaatggggtgatgagctccacgggatgccgctgcgccctttccactgggtgccgaccgcagatccagggtagcttccctcccgcccgcccccatccctctgcccctgcctgtcatgaaacctcaaagctccacccgctgctgcaaggggggcaccactgccatcgccccattctgcagagcaggaaactgaggccaggacgagtctgtcccccagccaggggcctatggacagtcaccgaccgctggatctgccgagggctctgccactgcacaggcctgcaagcttgctggctccacagctggcaaactgcagctgactcgtgccctggactaggggtggccctctgcatggccaccgcctgacattctagaatgttctgagaggctaagggccacatcccaccgcacacagagcggcggagccccagctcagcggacgggcactggggggctccaccacttactaccctgggattggtggtgggcaattcactcccttccctgccctacccaggaggcaggggtgggcactgcctgccccaaggcagctatgagaatgcgagaccatgagaatgaccctgagtgctgtgccgggccatgagggactgctctggctgggagctgttggacgggcacagggcggtgccgtgaggctgggcggtcccacctggctcatggagcagctatgggagaagccgggcgtggtgaggcgtacgatctcgccggccgcctcatagctgaccacgtagaggtggtgctccagcggcgtgtccttggtgccctggaagtacaccagcttggtctcctcattgacccagatctgcagggggacaggggatcctcgtgatgcgtcccagatgcccctgggcccacacccctctccacgccccacaggagtgggccccatgttcctcggactggggacgcatgctgtcctcgcccaagtctggctttagggctggagatgaaccatccctgagagatgcgcttatctggccccgtgggctgggagcagcccctggtcgagctgggaactgcgtgtcctcaggcgggacctggggcctgcattccacccccagacagctctttcctagcttgaattgggagggcccaccagagccaggtgggaaggccagggagggcaccgtgcccgaaacagaggctcagggaaacccggcagtccccagcctggtcagccgttcctccgacccaggtgcttgggttcagaagtggcagggccctaccttcctgtgggaagccccagtaggccccgaagtggtgtctcctggaggagtgggagggcagcctgcactgcgtggagcagcggggcccctccttcacctgtgctgggatgctaatggtctcgaaacaactgctgctgcccaggagcgagcaggctttggctgatgcctggaaaggagccgggaggcctcagagccccgagggaggagagggcattgcccctgtgcccagggcctgagaggccggtggaggcagctggagcgtggggtgaccagggaccctaagacgtgaagaaactgaggataagtggtctcctgggacagcggggcacaagcttccagtcgggggagcatcatgccccacaacaaggcagctggacgcatggccccagacggcctgcagaggacacacttcctctttcatgatttctaaaaggcttccaatgttttccttaatttcagggtgaaaggataaagcacgtgaatggcacaacgttcaagatgagacggggaggtgatgaaatgattggcttgtgtgtatggtagacaccgtgctgaggcctgcgaactgctgtaaagcagggtcctcacaggtgtgtgtgcgtgtgtgtatgtgtgagaatgagtatgtgtgtgagtgtatgtgtgtgtatgcgcgtgcgtgtgtgtgtgagtgtatgtgtgtaaaacacacatgcatggagcaggggaaggctgcaaggagaccctggtaccttggagccgtgcctcgccaaaacctcccattcaccgctggtcagagcaatctcttccttaatggggcacttaaattcatctggaaagaaagaaagaagggaggtgaaggggcctgggaggtgatgcaggcgcccaaaggcacccaggccaaattccacccgagcagactcaccatggagccactgaaaccccggcttgctgtgaactcagacgccagcacaggccactgcgtcagacctgccacatgggcaaggaagcctgcggggcctgttcctgccatgtggatggcaggcccagtgtttcccacgataaaccaggagacccgtggctcactcctgaaatcccagcactttgggaggccgaggcaggaggattgcttgaggccaggagtttgagaccagcccgggcaacatagggagaccctgtctctccaaaaaaaaaagaaaaattagccaggcgtggtggcgtgtgcctgtggtccaagctacttgggagattgagctgggaggactgcttgagccaggaggttgaggctgcggtgagctatggttacaccactgccactccagcctgggcgacaacaagaacccgtctcaaaaaaaaaaaacaaaaaacaaaaaacaggaagagaaaccaggaatctggattttcattggaatttcccaattttagaaccctccaaaggccacatgacatctgtgtgtggcacgggaaggggggcggggagtgtgggggaggagccaactgggcccatgacctcttaggacacattaggactttgtaaaaccagactttttttttttttttttttttttgaagacggagtcttgctcttgtcgcccaggctggagtgcaatggcgtgattttggctcactgcaacctccgtctcctgggttcaagtgattctcctgcctca[133 bp omitted]cagcctcccaaattgctgggattacaggcacgagccactgcgcctggccgactttttttgtgggggcgagggggtagagacagggtcttactatgttgcccaggctggtcttaaactcctgggctcaagtgatcctcccacctcggcctcccaaagtgctgggattccaggtgtgagccacatccccggctggaacaagatgctggtgaaagcgctagggctagagaccaaggctctgctggttttatgattgtttttttggggggtaggagggttgacttcatgtttgaattttcaccaggtaaagaatgacagtgcggggtgcatcatggcacacagcagaaacacactgagatggtttgtaactgagggctcactgtcctttcctaaccttttaggtctaaacaagctacggcaaacgtgtctgtcaggagcacgggagggcagatgtggtttccctggcgtagaggtctgggtgtggttacttgtggcatcggggcctggggaggagagcggttcccacccagccccaagacccaggctcctgcccgcgtcccgacgtgttccttctgatgcaatgtcacttggggtcacctcctcgccatgcagctgctgtctaggagatgcatggtgtgtgctgggggctgagcagggtgctgggaaatctggtgtgcccacctcacaggccgggggtccctgggggcactgcagcagcctggagggtctgtgcccctggagagtggcagctgcagctggctccacttgagaccacatttgaaacgtgagcactcgggctggcccattttcccacagggggcaaaatgagcatttacatgaaatcccaatgccagatggcggtggctgagccagccagacagaaagtgaaacaccaatgagccgaagacagctcccctttgagacgcttagccagtaagtctgcactggccgcatcccacccaggaggaccccgatgctggcctgaggcagctgtcaccccgccggtccgcatcatactcagctccgtggcagcctacagcatcacctgtccctggctcattcgcccttcagctcctgcagtcccggatgcctcgctccctggggtctctgtcccctgtgttgggggacgccttggctgctgtgtgggctctgcccccagagggcaccggaccacatctagggacatctgtggttgtcacaactggaggtgctcctggcatggagtgggtggaggccagggatgccacttggtgcacaggatggccccgccccagagaaccacccggccctggcgtccatggtgtccctgctctaactttgaagagcctgggccgggctcccggaccaccccacctctctatccagaagtgacccttgggagctctgtcccatcccgaggctgacactgtcagtgtgcaaggacacctgcaatcccaccaggagtctcggttccctgagctccaggcacgggaactggcccatacagcatctccactaccgggcacctcaacttgaacacatccaaacccgactctggattttttctctcctagaacagtccctctctgagtctgtcttagactggacctgcggagccctccgggcatccatgccgcctccctcctctctgatcccccaccctttccactgcaaacggtgtgggctcagctgtccaagcacatccagaatcagacccaccaggacagctcagccactgccatgacagcaagcctgtcgcctctcccggcccctgggcctgtgtgcaagctgcaaccagaggagtcatctgaaactgaggtgagggtgacgacttcctatttctctcggggtcaaagcccaagtcctcctggagccccagcaggccctgcaccatctgctttttctctccccaccctctcctccctctctccccctcctccctgtgctccagccacaggggcctcctccctattcctccaacatgccaggaacagtcctgcctgccccagggcctttgtacgggctgtggctctgcccagagccgtggtgtggacccctcacctccacagcatgctctccagagacgtcctcatgccctcccgttgtagaaagaaggcccctcaccctcaagcctctcgcccgactgcatttccttccaccacgcacatcacaccagaggcagcacctctaactgtttctggaatactgcctcctccactagaaggtcccaagagcagggattttcctttttctttatttacagtgaacaattccatcacagctacctacagcaggagctggcaaatgtttctacaaagggctagacagtaaatcttggccttgcacaacagtttctgctgggactacccagttctgctgctgcagcacaaaagcgaccacagacagtctctgtaaacaagtggctgtggctcagtgccaataaaactttatttatgaacacaggtggtgggccggatttgacctgtgggccgtaggtggccaacccctggttgtgctaagggcctggcacaggggaggtgctcagtaaatctgctgcctgaataagccaacagttgggtgctctaagccctgccagatcatgcagtcactggggaaggctggcttcctgccgatccctgttccttctcccgcagggtgtgctggctgagtgggggggccgaccaatgaacaaacagcatattgaaccacacgtgactaacgcgatgagtcgacagcattcgtcaggctctgctcaccttccccggggctgaagggctcactccaatcgtagccctgggattttaaaacggcggtgactttgtacaaatggcagaagccggtcttgcattcattggcgcggagaaagcagagctcgtcctctccctctgattgggggaagggatagaagatgtcatgaacctgtccggaaagcagatagaagatgcgtcagaaggtgtgggtggccgggcatggtggctcacaccagtaatcccagtagtttgggaggctggggcaggagacttgcttgagcccaggaatttcagagaccagcctggacaacatagtaagaccccacctctaaaaataaataaataaattagccaggcatggtggtgcaggcttgtggtcctagctactctggaggctgaggtgggaggatcacttaggcccaggaggtcaaggctgcagtgagctatgaccacaccactgcactctagtctgggcaacagagcaaccctgtctctaattaaagaaaaaaatagatgaggggagaggctccaatggctgccagactcaccaacccccctagaccctcttccctgccagccagggatggccaaggcctgagctcacttctccacacaagggcaaacaccacctgccattggcgctcagccttctaggacgtgggggtggggacagtgtgactccagggcccaggcgggcatacagccagcgcttgccccgcttacattgatccagacgttggtgacctcctcgtacaccacatacggctggacattcctggggacagctctggcagaggctagccgctgctcctcattctctgtgctcgggatgaacagggccggggggaggaggacgagctggagccactgctggggccggtccaggaacatggcccaggcgctaagggggaagatgcgggggaagatgagagggaagctgggagcctcagtggcctgcacagagaagctggggacgcagcgtccaaacccgtgtggaatcagggctgggcttcctgcgctggcttcacctgcacttggccaagtaaccctgcagcacccacaggcttccttcctggcacatgcttaggggaggacaggatgggtgacaagatttcatgatccaagtgttccggaaacaatggcctaagtctcacagcggcaagctctaatagtttctcctcttcactgactcttcggcccacagtcgctatcctttatttcgtagtttgctttattttatttatttatttctttatttaattttttgagacagagtttcactcttgtccaggctgaagtatagtggcacaatctcagctcactgcaacctccacatcccaggttcaagcgattctcctgcctcagcctcctgagtagctgggattataggtgcctgccaccatgcccggctaatttttgtatttttagtagagacaaggtttcatcatgttggccaggctagtctcgaactcctgacctcagatgatccgccagccccagcctcccaaagtgctgggtttacagacgtgagccaccgcacctggcctaaatgaacaatttttaaacttgaatttattttaagaggagatgttagtattctacgtggaaaagcagcacctccacacacagaacaacgaaaaccaaaccaaagggaagcatcacagggacataaaatactaactagagtgggtgcctgggctcaggcctgcaatcccagcactttaagaggctgaggtgggcgggtcgcttgagcccagaagttcaagacctgcctgggcctgggcaacatggcaagaccttgtctctacaaaaaaaaaaaaaaaagtccaggcacagtggctcacgcttgtaatcccagcactttgggaagccgaggggggcggatcacaaggtcacgagtttgagactgtcctggccaacatggtgaaaccccatctctactaaaaatacaaaaattggctgggcatggtggcacgtgcctgtactcgggaggctgaggcaggagaattgcttgaacctgggagtcagaggttgcagtgagccaagatcataccactgcactccagcctggtgacagggcaagactccgtctcaaaaaaaaaaattaaaatattagctgggagtggtgactcacacccacagtcctagcaaatgtacatatggcagcagcacataatagaattcattgttaacattccattggaggcattaaccaatgcaattagaaaagtgaacaggctaagaggcataggaatgcaaaagcaagaccctcatatctataaaaaatacaaaacattggccaggcatagtggcgagtacctatagtcccctctactcaggaggctgaggtgggaggattgcttgagcctgggaattcggggctgcagtgagttatgatcgcaccactgcactccagcttgggcgacagagcgagactccatctcaaaaaaaaaaaacaggcagaggctgaatttgcccactggggtttggggcccccgtttagggaggtggtagagttctctcctcgacatgggtgggaggctggggagtgagtacaggggagcacctctactttgtgactcagtttttctgagcctgaggtctggggacacctgaaatcccctctgtaggtctcctccacactctgggtaactggatcagcatgtcctagtggcactaacactgggactcataagtccagtgtttcatcctcagactggctgaggtcaggagggccctttggacactggtctgaggcctgtcctggcggttgcactgcgggaagacgtgagcagatggaaggaatggcacggaaggccaggaggcagcttcggtggctgcccagggcccagggccctgcaggtgaattccttgggttccagccagagacactcactatttgccatcccgggtccacccggccctggcgatgtactccaccttcgggaacagcgagctgaagggctgcaccagctccttctcctgggtcgagacgatctgaagggaaacaaacaggtgtgggtcatgccctggcctgcccggcgctgctcggaggagaaggccactgcgctgggtcccatcatgtcccccccaaattcatatgctggagtctcagcccccagaaccccagaacgcaaccttctttggaaatggggccactggagatgtactgagttaagacaaggttgtgtggatgagggtgggccctgatccagcatgactgctgtccttacagggggacacatagacatagacacatagagggaagccgtcttgagaagagatacaggaagcaacggccaccaagaagccatggagaaggagccacctgctagcagcttggtgttggacattatcaatttcggccgtgtaagcctcccagtctgtggtcctttgtcatggcccaaacaaatgactacacccaacaggggcaggtgggctgggcaagccaacggcggcaccccagcaggtgcctggacccaaaggctctggtctgggctgtcccttagagccaggtggctctgggcaagcacagtccccggacccagggcttccccatgcttaaacagggctggcacggcgtttccagggtattgagagataggggacctgagccttcctcgtgtctaaatggggctggcacagcatctctggaggatcaaagggagaaacggcagcagggcctccagctctaccacttgagtgggtcaccagccccacatccccaagccgacttgtttgattggcatcaccccagcccacctaaggactctgcacgtctgagagtgcaaggagccactaaaacagcctggcggggccaggtgcggtggctcacacctgtaatcccagcaccttgagaggctgaggcaggtggatcacttgaggtcaggagttcgagaccagcctggggaacatggcaagaccccatctctacaaaacccacaattagttaggtgtggtggtgcatgcctgtagtcccagctactcaagaggctgaggcaagaggattgccttgagcctgggaagttgaggctgcagtgggtcatgattgcaccagtgtactccagcctagacgacagtgagaccctgtctcaaaaaacaagaacaaacaagcaaagcaaaaccccagcctggaaggaggtttcacgtgcatcactggcaaagccactcagactgatcacctaaaatctgccagaatgctactgtcaagaatgcaaaagaaggccgggtgtggtggctcacacctgtaatcccaacactttgggaggccgaggcgggcggatcacgaggtcaggagattgagaccgtcctggctaacacggtgaaaccccgtctctaataaaaaatacaaaaaattagccgggcatggtggtgggtgcctgtagtcccagctactcgggaggctgaggc[138 bp omitted]agaggtcctaatcacattatgtcatttttgcaagagcacacaagggcctccttggtttgtcccagcccttccatcctctggtgcaggggaagggagggtttctctggacgcctggtgtccccatcatcatctgctctcctctgccccagcctctttggcccagggctctgtctgcgagttctccaacatgatgttacttaacttcctgacacccttctgggtcttatgggatttgcaacttccgagagaactgatcaatgtggggctattgggggtcccctgggagggcagggatgtgagagaagggagggatatgctgggctgcagggggtggctacggaggagggggccgagggagatgcggtcacaggtgtggtctgctggtgaccgccttgctgcggggtgatgatgccttttgctgcctgatggcgcctccaggctgtggggtcctttgagatgacccccaggtgatgaggaccctgtgtactagatctgaggaggtcggggggatggggatccagaacactctcctccccacagtagctgacgggtccggtgaacggacctgaggatctgcctgaaacgctggaggaaacagcccgtccgaagttggggtcccccagccatctgccccacggagttctctgttctggaaacttggagagagggcagctctggatccacacgtcacccactcccgaggtggcctgggagcacctgccgcgcctgtcctcgcagggcccctgcccggtgcttgttccttaccgcggcgtggcctccagtctcaggacccactctgtgaggcagggaggccagctcgccacgccgcattctaggcacaggtccagagacacacagggaaggcctgtggctaggcggaccgggcggcagggctggggcctggggagtgcccccgagagggaggtgagtgacctgcccatccacccagctgcctacccggcccttccccgcatcatctagtagattatctggtatgcagcaggcccccttaccttgccctggctgtcagtctggaactcagccagtttcaaggcaatcttgggattcttgctgcctgcaaaaaccgaagtgaggtgaacaccaggcaggcatcacccgtgtgtgccgagagccggcacggggggcctgggctgtggggtgacgtccacagagaggtgtacaattggagtgggggaggcaggagaagccaggtgtcccacggtctgtctgtaggcacatcgtcctgctggaacaggcatgacaccctcaggtggggaccttctgactttgggcctggatcgcattcccaacagtgatgtggcatctggctttctcatttaaaaacacgggccacaccctgtgctgagagctggggcttgtaggggccgcagataccaggaagatgccatccctgccttgggagagctccagagcagacggtgaagcccgaggcatcacagtaaaactgacaacgtgacaagtggggtgtgtcccatgcaaaaccagggagcccgtgtgacagccagacctgcgccctccggaggccaatggcgacagaataagggacccaagaggcttctgaagagtgggacttagttcaggctccgaaagagggcgcgggccacagcagagcggagaatgcttatttttttggctagacctacgagaaactcaactccagccctcgtggctctggcctccagggcaggtgacatctctgagcctgttttctcatctgtcatacgagggggaaaagactgacttagctcatttgcagtgggagttggaaagaccgtacaggaagcttccatctagcacggcacagagcaggcactcgcggagtatgggcaataacgatgctcttatatggtcccatgggggttgcaaacccaaggcctgaacgcggaatctgggctgcacgtgtgttctgtttggctccagagatatttttaaataattggaaagatgtttaagaattgggagtggccgggcgtgtggctcacgtctgtaatctcagcattttgggaggccgaggcgagaggaccacttgaggccaggagttcgaaaccagcctgggcaacaaagcaagactccatctctacagaaaatttaaatattagctgggcatggtggcacacacctgtagtcccagctacctgggaggcagaggtgggaggatcacttgagcctaggagttggaggctgcagtgagctgtgattgcaccactgtactcctgcctgagccacaaggtgaaaccttgtctcaaaaacaaacaaacaaacaaacaaacaccactgtagtgtgagggccaaatccagcctgccttctgtttttgtatggctgaaaatccttctttcgttctgagacggttaagaaaacaaacaaacaaaacaagagtgacattttcgctaatatgaaaatcatatgtatctcaaggtgaattatttgtaatccaaacttcagtcaagtttccttggcacatggctacgcccattcctgcacgtgccacttctgtgctccagcagcagggtggggcagttgcaagagagcctgccttcgtctggccctggaagcctgagatacctgtgccctcatcccttccagagacagcttgctcacttctgagcaatatgatccggtggccatggtaagccaggagaaaggggcggcccctgcagggcagaagccttccttctacacccccatagatgcccagagcacacacatgcagctcagagggcctgggggacagtgcacctcaccagccatgccccaggggcctcagatccccggcccagcccctcacatgtaccgggcactcacctgtcctggggtaccgatacgagtccgtcttcctttcttctagcgcaggagaggggacgtgaatgacctccacctcggactcatcgacttcctcatacaggattcgcagcgtcttgaggccctctgaaccttgggtggggtggtggaaaaactgctgagggtgccagaggcagagtccctgccatcagcaccccccgccccctgcagcaccggggcctgaagatgggcaccgagggctctgaaaccagaaccccggctctgccattcgctagaccttatgccagtcccaactctctgggcttcagtttcctcccctgtgcagtgggaagcagagcagggctactcccagcatgaactggcatgggaagtggccacgtggggtgtaacgggctgaactgtgtcccctcttagggcaacagcgatgtctacagtcgttaaggaactctctaggtgttggtattgacagactgtggaggtggtttgaggtgaaaggagtaaggcgcaggaaggacacagcctgtgattccaggaggaaaagcacgcccgggagcatgttgaaaaatggaagggacctaccttcccaggaggctgtggggcaccaccagtacccagtgaagcggtcgaactcttcctgtatgacgaaggtggccacacccgcagacttggggtcatccaggacattggataaacctagggggagggacggagagcatcaacaaggggtgagcagcctgctaacactggggacagccaggggctcaaggagagcatgagagagagggagagagaaggagggaaggaaagggaaggagagggggagggagagggagggagagggagggagagctcggagccgactgctttcaagcagggttgctccaccccacactgtggacactggggccctcttggtctctggggtggggccgtccagggcacagcagggtgctgagcagtgtccctggcctccactcaccccatggcaagccaggagcacccccgcccaagtgtgccgtctaaaaacgtctctggacatcgccgagtggccaggtttggaaagtggggcccgggcttatgggacggagaggcagcgatcagtgacttgaaaccaagacaaggaaggatggggtcacttctgatgagcaagggagtggagagaacacgcaggaagcaggtgagatgtggccttgacttgatggggctggacaggcagagtggaggggaaggtgtgcaggggcagaaatgcccaggggcacctggaagagggtccagagcaccgtggctgggctgacgcctgcagcagaaaaccacagagcggcagggtgcggtagctcatgcctgtaatctcaggaccttgggaggccgaggcaggtagatcatttgaggtcaggagctcaagagcagcctggccaacatggggaaacctcgtcacaactaaaaatacaaaaaaaaaaaaaaaattagccaggcgtggtggcgggcacctgtaatcccagctactcgggaggctgaggcaggagaatcacttgaacccaagaggcggaagttgcagtgagccgagatcataccactgcagtccacctgggcactcccgcctgcgctcccgcctgggcaactgcactcccacatgggtgagactctctcaaaaaaaaaaaaaagaaagaaagaaagaaagaaaactacagagcggcagggacgccaggacctcccgggagacatggtaggctacagaaggtatgcacgggagggtggcttgtgaggggtgtgtgcaggaagaccctggctgtgggggcaatggggcctttctggaagctggccaggtggctatggtggccgtgcacaggaggggctggccccaccttggtggcagaaggtcagccgccgctcctcgcctgtctcgatgttggccacccacaggtcgctgttattgatgaaggagaagaaggcagggtcggcagggcagattttggggtccatccggggccctgagcactgggtcttgatttccagcggtttcataggggacacctgaggacagagacgcccagctcagggggaggggccctccacgccacccccgcacacagccagggccagggctcaccatgaagccgttcttgccgccgtcgcggcagtggaagaggctgttgctggcctggaagaggaagaggccactctcgctgtggaagtcgtaggaggtgatgccgaagacccccaggcgtttccgctccctcagcagctcctcctcccgagagtagaccccatggtggggcgtggcctggaaacatacaggggacagggggcagcgtcagtgggcaaagaggatctcccgctggccagggcagagatcctcgggctggggcattcccagggaatctgacttcgggcctcgccagagagaacttcctgtactgggcagaattggctgccggagcccttgacacagtgggtggccaaagattgccagcgaacctggccctgcaggactggctgagtgtcctaggaggtggcaggggagactctggggccagaagcctcctcacttcctgagttccctccccacagaccctctccatagcagatgggggcccctgggaggggctgtccctgccccacaccaccggagtactctctccgggtccctagtgccattcttacagactccccaccctcctaccctattcacaatcccttcccatcaagagctttcaatttcgtaatcccagcactttgggaggc[134 bp omitted]gaggcagaagaatcacttgaaccgggaggcagaggttgcagtgagccgagattgcgccactgcactatagcctgagtgacagagtgagactttgtctcaaaaaaaaaagcagaatcaaaagcaaaattacccctacactctgtggaaagcagtgtaaacacaaggacactggcttggggactcagagacaggccaaagtgagggccagtgaaccagtggtggagaaagtgggagtgtcacgatctcagccactgttagatatcattattgttacattgttatgtttatgttgttactatgttataatgttatgttatttttattgctatattgttactattttagagactgggattcgctgtctcccaggctggagtgcaatggtgagatcacggctcactgtagccttgccctcctgggttcaagagatcctcccatctcagcctaccaattagctggaactacaaggcgagtgccaccaggcctggctaattttattttttgtagagacaggctcttgctgtgttccccagtctggtctcaaattcttgggctcaagcaatcctcttgcctcggcctcccaatcatcaaacacaaaaacacgccaatcaatgcaaaaggcatttttcctccctcaactatccccagagagccaacactggatgagattgatgattaaccagtctctctaaaagggcctcaagccaagttaattcccaatctttggtgatgccgttaaaaggaagagatgcttttggtaagagtttctctgtcgcttgagtacaggtggtcagggggaggagggaaggctcacccgccagagtccacaggacggagggtttgtgggaactcacagccggtggggcagagaggtgaccgaaggcatgtatggcctgtggggctggcctttgccacctcctcgcccacggtagggcccacgcctaatagcacagcttacctggaaatgatccagcatctgcttccaggacaggagcagcagagcctctttccggaccttcttgggaatctcagagtagaggagggagttctctcggctgccatatggcattcctaaagggagaaaggaaacacccagaacgggtaccctggctcaggatggggagacgccctcagcctgcagctgggcccagctggttccctctgcttctagaacattctgccaggccgccggcgggacagccctccccggaaagctatggatcctgggtttgcttaagtaggcagtagggccttccacctgagatatttctgctgaatctcacggcct[131 bp omitted]aggccccgtctcaaaaaaaaaaaaaagaataaaataaaagaaaaaagaaagaaaaataaatcgcacacaagagaacaagaagggcagtcagaaacaaacatccaactctcaacaggttgggttcggctctccaaggccctttatcaaggcttttgcagacgacaagaatttaatataggattagagggagggcaaaaccatcaaaaaggaatgagggccaggcgacatggctcacgcctgtcatcccagcactttgggaggccgaggcaagcagatgacttgaggtcaggagttcgagaccagactggacaacatggtgaaaccccatctctactaaaaacacaaaaattagccgggcgtggtggcacgcgcctgtaatcccagctactcgtcaggctgaggcaggagaatcacttgaacctgggaggcagaggttgcagtgagccgagattgcgccactgtagtccagcctgggtaacagagcaagattttgtctcaaaaaagggaatggggaagcgtgcacctggtccagtatttcccaacctcgcccctaattacattcgggcctggaccatcctccggggtggggctgtcctgaccactgcgaggcgctgagcagcatccctgtcctccgcccactccatgccaggggcaccccacagtcgtgacaaccacacatatccccaggcatctcccagtgtcccctgcaggggcagaatcaccccgacctcaaaccactgatttaatcgaagcttctgtagaaaatgacggtagtgagagctgccaagcgagggttttgggtggattacatgaggtaagaaacgtaaagctctcggcacaatgtgtgtgaccctctgtgaaatcagcgtatttcatcagtaagccgcggctttccacctacgcatgtctctgggcttgggatgggtcttactgcggaaggcgcaatcaggtccttagtggcaaataaaataactgtgtattttccaaatggtcatgtcttagatctgctggatgacagtacaattgtcattagaaaagggaatggcagaagcaggatggtaacccctgggaagcctcggtttcccctctccatgcgacaccactgaaaaaccgggacagggctcctccaagcataaagctgtccagtagcccacaaacgtgacatgactaacgacaagtcacagacagcccggtgccctggcccctccttgctctactttcaaccctgagtttctccaggacgaagcctcggattggtgctgtcctgtcctcttttcaggacctcctcatactcgctttttttttttttttttttttttttttctgagacacagtctcgctctgtcgcccagactggagtgcagtggcacgatgttggctcactgcagcctctgcctcccaggttcaagcaattctcctgcctcagcctccagagtagctgggattacaggcgcccaccaccacacccggctaatttttgtatttttagtagagatggggttttaccatgttggccaggatggtctcgaactcctgacctcaggtgatctgcccaccttggcctcccaaaatgctgggataacaggcatgagccaccacacccggcccttgcttgcttttaagaggagaacaggaaggccacaagctcgccgcctctgggattagtgcttaattagtaatatctgtgccatttttatttcttgttacaggcagccgcagggtcctccagttcctcctgcttgctttctgtgtcctgactgaaaatcacagactgccctgacctctgtggctcagccagctgcaggtttttccctacaggcttgaaccagagcctagaacattcccaggcactgataaataccgaaagccagcccaggccctgagccaaaatccttaaaccctcacataaactccataccctgacccccttgccgaggacacacctggctgtagaacacgccttttctctgatgcccattgcaaggacactgaagcccaccctgcaccgaagaccccctggaaaatgctttggactcatccccctggcatttagggttcctttctttggaatcccaaccagccccatctggggacggttcagggcactcccttgtgggaactcctctgctgctgcttttggggtgactgtagctgtgggttcagtgggatgaaacagaatcttctcactattcacaacagcaaagacatggaatcagcctaaatccatcaacggtagactggataaagaaaatgtagtacatatacaccacggagtactctgcagccataaaaaagaatgagatcatgtcctttgcagggacatagatggagcaggagaccattatccttagaaaagtaatgcaggaacagaaaaccaaataccacatgttctcactttataagtgggagttaaatgatgagaacacatggacacatagagcagaacagacactggggcctattggagggtggagggtggagggggagcagcagacaaaataactatcgggtactagcctgggtgatgaaataatttatacaacaaacccccgtgacacaagtttacccaaagaacaaaccggcacatgtgcccttgaacctaaaagtttgttttcttgagagagagtctcgcactgtcacccaggctggagtgcaatggtgcaatcttggctcgctgcaacctccacctcctgggttcatgcgactctcctgcctcagcctcccgagtagctgggattacaggagcacaacaccacacccggctaattttttgtagttttagtagagacaggggtt[143 bp omitted]acttctagttgtggcaaggaacacaggtttcccacgcatgaggaagcgcgcttgtgaagtacagtagtgacggaaggatgtacttaaagaaaaagattagattaacagggttccttttaaagtgtatttatgaaaaatgcaaagttcagtgagatgtgtgtgggaaggagaaaaatcgtgcggagactcaggggtgagcaaaagaacgcaagtgctggaaacacgactcaatctctaagagcccttgaagctgccaggaccctgcccgtccggccgcccatggggatgagggtcaagtgatgtgtgatttcgctcgtgtgaaatgtccagaacaagccaatccacagagacaggaagtgggttcatggttgcccggggcttgggagtgatggttgatggggttgctttttggggcgagtgaatgttctagaagtagacaatggtgatggctgcacaactctgtgaatgcgtgactaaaagccactgagtttcacaccttcaaaagtgaaactgtgcaatgtgaattacatctcaatttttaaaaagcaccctgggccaacaggaggggtgggagggatgggagggcctgggcagctagtccacagggactctccaggagagctggagctttccaaacaggaaatcaaagccacagacttgccaaggacaccagggccacctccttctaggctgattaatcaatgatcaccaaatggcccctgccagcacattcctcgggcgagctgctgctggcactatgatggtgacaactggcctttgaggcaagggctagaggtgaccgccaagggctgtggatttctgctgccccatccctcctcggacctccctcaccagctctgcccctgcaaacacacctgatgccaacctgtcacccacccatgccccggtgacccaggcctgcgcaaacaccatttcccgtcactgcacgctgtggcctcgagtggctggcctggtgggggatcgtgatccacacagggctagggctctcccctggatctcagcctgggacgtcgggagacaggaattcttgctttccctttcgagggagttccagaactgtctggaaccctgtggcctcctccagccacagaagtcaccgtttgcagtggggagaggctgatccgcgtggggcgggagcggggtcgggagcgtttcccaatgctgcagtctgaggcctggaacctgagccggccccagcccatcttcccagcagcaggaaccgcacgttcccccgctgctcctgctagcctgacgctgggggctttatcatgtggatctgaaagagcctttccggaggggcccagtgattagctccacatgccccacagcaaacctggtgcctgctgaggggacaggtcccatgctttgagcagcaggccaggcctggccttgaagtctggacactgggctagtgctaagaagtgttattattactcaggggctggggggaggcctgccccgagaacctggatgtgacgtgagctcagtgctgcccctgacagtgtgaagtgacagcctggagtcgttgaagggtgaatttcaccccgaaaggggcagtctggtttttgagctactctaggtacgttctggggtttctgccaagttcatgcccactggggtgggccctcagcacctcctgtgtactgtgaggacctgcctgtcccagccccagacacacacacgagccacaggcgacccgacgatctcatctatgcggagtcaatctgaatctttgtcccggaaatttggagaaagttcctccgtttctgctggtggctagaacctgaggcatggaatcccaggcgctgtggaggggttgcggaggacaggtgggcagcgaggtggggtggacccaggcacggacagatgcctggcttctggaaggctctggttctcaggcgctgcttcctgaggtccactgggctttctgctcttgggttccatgagatgcccctctacctttactccaggagtacttcatggctcagacgagcttggagggtttctgtcccttttagcagctccacggagatttgaatgatggccctgacagagaggtgtccacatcctggggctcgggtgtggaggctacgttacacagagagacaggcctgtgcggctgggattaagtgaaggctcttgagctgaggagatgatcctggattacccaagtgacccagatggcatcatgagtccttatcagagggaggcaggccaggcacggtggcttacgcctgtaatctcagcactctgggaggctgaggcaggcggatcacctgaggtcaggagtttgagaccagcctggccaacatggagaaaccctgcttctactaaaaatacaaaaattagctgggtatggtggcaggcacctgtaatcccagctactcgggaggctgaggtaggagaatcgcttgaacccaggaggcggaagttgcagtgagccaagattgcgccattgcactccagcctgggtgacagagcgagactccatctcaaaaaaaaaaaaaaaaaaaaaaaaaaaggaggcagaggggaatttcagacagaagagaagaagaggaggaggaggaagctgtgtgaccatcaggccagaagttccaacgttgtggccacaagccaagggatgctggccgccaccagaagctgcaagaggccaggactggttctcctctggagcctccagagggagcgtggccctgaggaaaccttgatcttggatttctgccctccagaagtgtgaataattttcacaatggcagccacagaaaactcctccaaacgccctgaccaggacagcaaccccaacgggagcaagtggcccaagactgtgggcgccacaggataaaaaagaggcaacggcccatggcagccgtggtctgtacacttgtagtcgtaacagccaagctctctcaggtaactgaaactcaagccatttcagtccaatttctcccagactagagttggccagcattcttaaaggcccagacagcccaggtgcagtggctgatgcctgaaaccctagcattttgggaggctgaggcaggaggactgcttgagcctaggggctcaagaccagcttgggcaacacggcaaaacctcatctctacaaaaaatacaaaaaattgtctgggcatggtggcacgtgcctatagtcccagctacctggagggctgaggttgggatgatcacctgagccagggatttccaggctgcagtgagctgtgattacaccactgcactccagcctgggcaatggagtgagacctcatctctaaaaaaaaaaatgaaaaataaaaggaagacagtaaatgttttcagctacgtgggccatatgacctctgttgcggtgactctcctgctgtagcttgagaacagccaaagatgtcaggaaagtaacagggaccaggaaaacctgacttctgaagacggctgtcacctgccgacccctgttctggatgattcttccttttaaattctttgtttgccagaccaccatctgattcccacacaagtctgtctgtggagagggactgcgctgatggcggaagaagacagccacctggtgtccacctcggtcactgttgttagcatgtggtcagcctcaggcagaggatgacggccgttcactggttccaatgctggctgggggctgcagcacacgcgggcctgggctcaggggctgaggacaccaccatgagtcccatggatgagtgcagcggtctggacaaggatcccagcgccaccccacccccaaggaacacttggcgatgtctgaggacatctgtggttgtcaccactgggatgtggctgctcctggcatggagtgggtggaggccaggaacgctgctcaggaccctgcagtggccggacggccccaccccagagaacgatctggccccaatgtccatggtgccaagcgggagagacgctgcctttggtccccagccatgtgtcacgctgctttcaaagacacaggcctggctgatctctccaaggtgtccttcctcccagctcttaaggcctctgggtgcagtgggcaccatccgaatatccgctgcccacctcacgggagccaggcccacagtggctgcagaagctgctggaggacatgcagcctaacccgtgccctgaaggcactcgtggtgcagaggagcccagtcccgtgaggcactgcagacgctgcaggaggagctgcgtgcaggcacacgcccagaggaggaagtgtggatccagagcctgcagcaggggctgcaagcgcgtggcaagccgcccctgtgctgtcaccggcggcaaaccaggttctgccatccgggcggctttcccggaacctcgggatccttcttgacgcacctccacggcgagctcctcctggagttactcccgactccctctgggaatggttcagtccagtcctgtttgtcacgagccccacccagcccggaccaggtggctgggaagtgactcagggggtggacccggctgactagcactggaaacaatctccgggcttggagccacagggccggcttgagccacggcatcctggccacatggaggagcggggctgccctgtgcatggctccctgcacggctgaccctccgggggccgccccacccaccccgcggcagcccttccctgtagtcagagctgtctgtggctgagcctcgaaggacagcatgcccagggcccagccatccgagcagatcttccaactcctgtggacctctgggaacagagaggaccagggaactgtggtcccagatgctgtccccgcccaagcagcctgcagggcccggcttacccaggtagtagaggcggtgggagtggggcccagactcatccgtcttctgcacaaactggaagtcgtggggcgccttgttgacaatgaggcccgagtacttgcggctgccgtggatgatgctccggagcccgtcccacgagtgcttctgcacctggaagcgggcggccgggtcatctgtggcggctgcgtcgcctcggtcggccgttggggtcccggtggtggccatcctctcagccccctcggaattcagcgagaagctgcggggaggaagcaaagactatgagaaaggagaactgttttacctacgagctgccccaatgctgccccttgcgaggcactcaggttcttccagacgagccccacccctgccgctttccccactccctaaacacttcttgggttggtctacctctctccatgtcactaatgctgctaagattcaagccaccatcacctctcaaatgaatgatctttaaaaacattcttctttttggagatgggggtctcaactatgttccccaggctggtctcaaactcctggccacaagcaatcctcctgcgtcagcctcccaagttgctaggactgcaggtgtgagccaccatgcttggctttggctgaatgactgaaaccacctcccaccaggatgttccacatccactgccaagaccccatcacttaaaacccttcctggttttccacagtccccgggataacaaccagttctcaccaccacctcaaggctgctgtcgacccctgccaagcccttgaatctcatccttcttatccctgtgacccagccaaatgagccttcactcagctcctcaaacaggccaaattcctttccaccgcagggcctttgcacatgctggccctcctgctcggagtgcatttttcctcactttgcttaacttctttgatatatgtttatatatatatacttttttttttttttttttttttttttggagacagagtctccaaaggctggagtgcagtggcgtgatctcagatcactgcagcctctgcctcttaggatcaagcgattctcctgcctcagcctcccaagtagctgagattacaggtgcctgccaccatgcccaactaatgttttttgtatttttagtagagacagggtttcactatgttggtcaggctgctctcgaactcctgacctcaagtgatccgcctccctcagcttcccaaagtgctgggattacaggcatgagccactgcacccagcctgcttggccagcttctaatcagatctcagctgaagtacttggcaggccgtcagaaacctttcacaccatccacgctgaagctggtctttctgctcatctttcacacgccacctggctgtcccctccctccaccttcatcacagcggttatttgtgggacccctgtctcccccatgtctgtcccattcacagctgtgctcccagaaccttagctggtggctggcacgtggcaggcattccacggagcactgtggaatgattatctctcagtgggctcgcggggagacatgctgggtctcgggagaggcccgggcgtgaaggaatgaaaatccatcctggtcacctgtgctgttggcttgctgtccagccggggagatgcttggccttcactggaagttccagagcctcgggatgtgggaggtgcaggtgaaagggtgaatggcacgcccttccccaaagaatatcccactctctcctcccactcaggacactctgggtccgcaaagcagccaccgtgagtggccgccgcggtgtcacatctcccaccaccccactcccgccctcgtcacttagcacactccttgacctgactggactggccaggcaaatatttgttttacagaaatctaaacatggccgcagtgacccagttctgcgagagccagtggtctggaaagggtggcaccggggctggtctcgcttccctttgtgggctccgagtgactgccgaccttgccagaagccctgtcctccgggaccaacagcttggcttggggaagtcgctgcttgcttggaggaagtgggaaaacccgcgggagtggacagcagggactgggtgtgagagaagtaaagggcagagatgagtgggccgccttgactctgcagtgtgccagttcccagaagactctgcctcttgccaagaggagaccccacagggtaaccactgcaagagaaagggccccagcctgctttgagagggaaggggagaaagagctgcaaggatgtcaacgagcgcctttgaaagatcaggacttggccgggcacagtggctcatgcctgtaatctcagcacttcgggaggccaaggcaggaggatcatgagatcagcagatcgagaccatcctggctaacacggtgaaaccccatctctaccaaaaatacaaaaaattagccgggcgtggtagcgggcgcctgtagtcccagctactcgggaggctgaggcaggagaatggcgtgaacccgggaggcggagcttgcagtgagccgagatcgtgccactgcactccagcctgggcgacagagtgagactctgtctcagaaaaaagaaaaaaaaaaaagaaagaaagatcacgacctgcaattgtcacctcatttgggccttacttgggcttgtgacagcccattctacaggtggggaaactgaagctgggaggtcactggagcttgctcccaatcagagccgagtgaatgagcaaaaggggttcagtggaggcagcccggcccccggcctcccactgacatgctgtgtgataagcccagcaattacagcaggaaaagtcacagagtgcagcccagagaactgcccgtgccgtgctctgcgagacacccgtgtcctgtgggaaggtcccgtaagccaaggagagtagaagccacctcagcaagggacatacgaaaggctcatggggcggaagaccccttgggaaggtggcttctgagtatcacggctgtgggctgatttctggaggtccctctccaactcgaccccaaagaaatgacaggggaaaatgcttcccttgtttcatcctactccatccaggcagggccagcgtgtcctgccctccagccagaaggggcgcagtttgttagttcagctcctcctgagacagaaataaagacacgaaccaaaggacatcagcacttacagggctctcaggtcacacacaggatgtccgcgcccactgcagagctgcaggtcccctccagggcagtggggagccacaagcagcgttaggcagcggctgggaccaggaccgcctgagcactcaagaacccccactgccccaagcactgctggcagcaagcccagaaaactgagcccggggagctcctctgagcggcctaagcacccctctaagctgtgctgccccaattcaagcctggctcacggcagcaaagaaaaaatgtgaccttcggagctcccaaaggggccacccataagctgagagcctgcccggaagcacttatagacccgcgtggcttgttttcattgcaaagaacaataaaaattatcttgcctctgatcaccactgatagcccaagaagcaaaaattcgatcccggagatgagaaatgaaatgaaacatcgcgagaaacttccaggaatcttctggatgtggctagactctttagcttgagcttccagacaggccgaggcttggtgctggagcctggccctccgctgacctctcttctacccgggggcacagcccggattgcagagaggctggcgcaagagtgagggagcgagggctagcctgtgatgggctttctccacctagcaccaccctatgctgtggctcaggggagtcaagagtttacacagctgcagagatggattccaggccacttactcaagtctacctactccttccttcggccaatcagctgggtgcctctgcggcctgtgacaccaccagcaaacagctccagacctcctagcatggtctctgtcaaggctgggtggcagatctgtgatctcctttttaaatttttcattttttttaagagatggggtcttgctatattgcccaggctggtctcaaactcctgggctccagcgatcctgccacctcggtctagcaaatagctgggatgagaggggtgcaagccaccgtgcccagctccaaagctctgtgatgtctgtgtctgagctggtgctttggtggcgagcgggggcgggggagtagttggagatgggggaagtatttggacgcctagaaggaactgtagattcagtgctgactgcagttctgagttcaggccgaccacaaggtgataaggcagaaagaaaggtgggagcccctggctggcgtggggcaaggggcgtatgggggtggtgaggacagggtcctacccatgcgctggatggggaaatgcctcaaggtggactttgggcagccggcccaggccaggcaagtgcccctgcaagtgggggctgccggggaaacagcatgccaccctctgtcctacccaaactgcccccagcactgcctgggcctttagctttgatgagcaacctttacagagtcacccagcagcctgtgcccaggtgggacattaagtgtgtgcagataagggaagggacacagatccccttcagtaactgacccctaaggcatgtgcccaccagacgctgggaccacccggttttagagcccatggctgggccaatcatagcccttcacaccgtccccgtcttccccggtccattcttcaattcccttcccagctgagcatgctccattgaagcaaacaagcctaagagtattagaaaattgaatactgagaaaggttcgcagggtcgaggaattcctaccgccttttcatctcgtgccaggccctgagacatggagtttactgactgccccggggggtgcgtgtctaaccacattccatccacacctgattttagggcacttc[210 bp omitted]gaggcagaagaatcgcttgaacccgggagatggaggttgcagggagccaagatcgtgccactgcactccagcctgggtaacagagcaagactccgtcttaaataaataaataaataaataaataaataaataaataaataaaaatggactcagtgaggttgaatggcctgtccaatgtcacccagagaggaaggggagtggagccccagtctcttggagcccaaaacccacatccttacactgagatcagcagttcttacccaggagtgattctgcccccagcaaacacttggtgacatctggagacatctgtggttgtctcaactgaggggagctcctggcatgaagtgggtggaggccagggacgctgctcagcaccgtgaagtgcctgggatggccccaccccagagaacattccagccccagcgtccacagtgccgagggggagaccccgcactacgccacactgcctcctcgcttgaaataaccagaacagtcttggggacgtgctggggaagccaggggagagggaaagaaggggccttccagatcttagactgttggggaattccagaagctgggccacatcctcacggatcagggcctccgaggccaacctcaccttctccaacttccggtgttctccttgtccaggcgcagtttcttaaccttccgcattaaccgctcagctgacctcaggagggcaggggtgcctgcgggcaagtgggaggagagatcaaagggctgcaaccccagcaggtggggagtgggcgctcctgcccccttcgccccctcctcattgctccaggcagccccccaagcctccggggagcaccctgaagccaagggcattctgaagagacgatgcttcaggccctggcctgaaatgcaggaggttctgggcatttgccagagcccgtcatctttctcaacaggaggttcctttcaaggtgtaaagtccctgggagtttcaagtgactccagggacatcacaccagggcacctgctggaaatagaagaatcccaaattcctcactgtggccgttgcctgatggccctggtgaccttgcctacttgcttcacccttgaccatgaccttcggccacacttgcctccttcttgtccctcaacacacctgctcgctcctagcacacagcttctgcacgacgcaccccgtggcctgaaatgccagttcctgcttttgatatgacttgctctttcttgccctgtggctcctgataccacctcttcagaggtctttcctgagcaccccatctgaagatgctacctggcgacccccatcaccacacccagacgctgatacaatggcctggaccataattccagttgtccccttccccagggagagtggttctcaactgggggcgatttggcccctcaggggacactggacaatgtctggagacatgtgtggctgtcacaactcgggggtgaccctggcatggagtgggtggagcccagagatgctgcttagcaccccacagtgcccaggataacccacctcagagaaggatcccacctcaaatgtcagcaatgccaagccggagacccctgcatccattacttggggagaaacttgagttcaacgcctacgctcatattaatactggaataaacttcccatggaacaagcattctaaacgagggggacccccagctcctgggattcacctcctttctccctccccactcagggtgaggatttcaatgtgtgcagcctcctgggaccttagtagggcagaggatcatgggacgcagtctcttggggatccatggaatcccctaacccaggggtctcacctggggataaccggcccccccaggggacatttttggttatgacgactgggacggtgaggggaggcatgtggccagtggaggccagcgatgctgctcaaccccttacagtggacagaacagcccccctcccactcctctgccaagaatgacccaaccctaaatatcagtggcaaagctgagaaaccctgctgtgggtaagggggcactcctcacgggaatatcagttccacagggcaggccacatctatcctggtcccaacagattgcctgagcccagaccatgcctggtcctcaacaaacatttcaggttgaatgaatgagctactgtgctttcttggatgccgtctaaagtcaaaggggccccttgtttggttggtgcccaactaccttctcagacaagccaggtcccatgatgcgcagttgcccaaaggcttaaagaagagagggccagctgggtacagtggctcacgcctttaatcccagcactttggggggctgaggcgggcagatcacctgaggtctggagttcgagaccagcctggccaacatggtgaaactccagctctactaaaaatacaaaaattagccagctgtggtggtgcaagcctgtaatcccagctactcaggaggctgagacagaagaattgcttgaactcagaaggcggaggttgcagtgagctaagattgtgccattgcactccaggggtgacagagcgaggttctgtctcaaaaacaaaagaagagagggaagcacatggggacaggactgagattttaagggaagaggttaagcataaagtcaccacgaaaaatcactggccatactctcagtccagtggtgaaaagcgtgggctctggtctcagagagaaaggttcaaatcctgactctgccacttctggggaagtcgctgaacctctctgagcttccacttccccagcgagaacatggtatgacagtatctacgcctggggccaccaagggaattgaatgagactgcacacatacagcttttaacacagtgtctgatgtagcacaaactaaatgacagctagcattgtcaactaaacaagatactcaaaaccacaggaagggggagactcaaactaaagtcctttcagggccagaatccacaccatttactgaccgggtcaggcagtgtaggtggatccaggcacccctccaccaaatcctgctgaaatcagcactctccccttcctctcctcaaagccttcaaaaagctccttccaggggcagctagagggggacaggggtggaaagaaaagcctccagcaggcgcacaaaaaactgcagccactgccctgcggaggacaaccatccagggccatagaaaaccatttcctgcccatgtctatattctagagcaggcaaaggaatcccaccagcccacaccccagccttcctggctgccaaaccccagcacaactgaccttctaaagggtccagagagcctccattccagctgcaggcgtgggacacagacctttataggataaacatgtcatgaatgtggcaggttaatggaagcaccggccagccgttcagcctcccccactcaggagctgcagactgtcaggcccgattctacctggctagattctagctctgccttgaagccctgcagcactgtctgcatgccctggacagaatctgggagagaagccatcccacgggccccgattcccctgggacccagcagaggaatgcagggattggtgcctacggtccacaccccctgggctttagtcccagctcctcgaaagcaggttggttcttgcctgggaggcaagtgacttcctcctggggcccctggggaagaccagggggtgggggccaagggaatagaccacttttgatggctcagaggcagcgtgaacagggaagtgtcagggctggcctaaggctgtgtgggaagaaggtaggcggttggacaggcctgagaagggaggctgagagaagggggctgaaccctgtgggctggacccttggaagacagctatgctaaccactacaccaccaacgcctcggcaggaaaaagagtctctggatacccttaatagagggatcaagtagggttgaggatcaggactggattggggagaccaagcctcggggcgaaggttggaggaagtggtaaaggagtgaggacaggatgcaggtcgagggaggtggcctctgtgcatatacagcatttgcatggggagagggaggagatcgggacctccagagcctgcacgaaaggggagagggtgtcaaggtctgcagctacgaggacgttcttgggtgcggccacctccggaaggggtcagagcctggtggcctgggcagcaacgggatgggtggggaagcccatcagggaaggggagaaactgggaggtggcctggccagcgcaggaatcggggagggaaagaaggtggaggagggcctggggcggagaggaaacgaggcagggggccggagggacccacagacgggtgcatggaggctccggggtgcggggaggccaggcgatggcgagggcagggtcagggccgaggcggggccggtcaatggcgggttcagggtcgcggccggggcgggacgaggcgcgcgggcgctgctcaccgggacgtggggcggcggccggactgggcaggtcgtcccgggtccagcggcgcctcacggtcgcggctccatgcccgggactgcgaccccggaagtggcgggagcgggggacgacagccgcggcggacacaggggacccgccggctcaggcacctttgacccggaagttgagcgacccaggcggcggcctgggattggacaccaccaggcacgtaccaaggcgtccgcggcgcttgggggggagcccgcggcgcggcggcctaaggtgcgtaacgccccatgaacgacatcttccggtgggttagggagagacacccccctgtgacttggtatcactcagtcaaacccatgatcccccactattaaggatatccggagaggatgctacctatcagggcgttggtggtatagtggttagcatagctgccttccaagcagttgacccgggttcgattcccggccaacgcatgcggtaccacttttgcgagtttgaaattttcattttagttttgagacggagtctcgctcggtcccccaggctggagtgcagtggcgtgatctccgctcactgcaaccaccacctcccaggttcaaacgattctcctgcctcagcctcccaagtagctgtgattacaagcgcacgccaccacgcccatctaatttttgtatttttagtagagatggggtggggtggggcggggtggggcggggtgggggggggggggcggttcaccattttggccaggctggtctcgaactctgacttcaggtgatccgccctcttcggcctttcaaagtgctgggattacaggcgtgagccatcaatcacggaaaatttttttaaatcccataaaaatgtctaaaaggcaggaggaaggcggaagagaaagaatgggactagaatcgttctttcggtgaatttcaaatagtattactctccggttaggaaaaacagctgacctgtttccgcccgggatcgaaccggggacctttcgcgtgtgaggcgaatgtgataaccgctacactacggaaaccggtaggcgtcagggttctttaaattctcctatagagataatgttgcagtgatagttgcgttgtcccaccaaagaaacactggctacagtcagctaaagcaatatccgctcttcctgaatatctgttattgtatttgatacagtagagaccgaaagaaggaaaataaggaagacaaaaagaaatccaataaacaccctttccaacacacccacccacccacacacatgtttatcactttatcataaatccaccttccattaaaacaatgcacgtcaaacggcccacaaacccatccggggtcaaatgaagcttttcatctcatagatatcaatctatacttgatatcacattagtttctgcagatattcaccattttgctttagatcaaactacttttttgtgtgttttgttttttgtattttttagagagagtctcgttctgtcgcctaggctcgagtgcagtggtacgatcatccctccctgcagcctccacctcctgggctcaagcgatcctcccacctcagcctcctgggtagcttggaccacaggtgtggaccaccacgcctggctgaattttaaaaaatgcgtttgtagagacggtgccttatagctgggactacaggcgtgtgcaaccactcccagctaacttttgtattttttgtagagactagagggcctgcactatgttgcccaggctgctttccagctcctgacctcaacgtgattcgcccgcctgcagcctcccaaagtactgggattacaggcatgagccaccgcgcccgaccccaactacactgtaaaagagctttctgaaaagaaaaactgtgtgtgtatgtgtttaccttccgatggagttttgctcctgttgcccaggctagaatgtagtagcgcaatctcagctcactacaacctccgcctcccggattcaagcgattctcctgcctcagcctcccaagtagcggggattacaggcacccgccaccacgcctgactatattttgtatttttactaaagatggagtttcgccatattggtcatggctggtctcgaactcctgacctcaagagatccgcccgcctgagtctcccagagtgctgggattacaggcatgtgccaccacgccaggcctctttattttcttaaagagacagtagaagaggtgggaagatgatggcaagaatttagaatcagactgctgtaaaattctgcacaccctcactcctgcggggctgggattagggtgaggagactaaagcattgtaaggcactggcaccaggtgcaaaaattaaggtggtgccaaaaaactcaataatcaagataaataatatttcaatacatctttttttctctctctgttgtcgctggagtacagtggcacaatcttgacttactgcaacctccacctcccaggttcaagctattctcgtgcctcagcctccctagtagctgggattacaaacatgagccactatgccaggctaatttttgtatttttcgtagagatgggattccaccatg[262 bp omitted]actcgagaggctgaggcaggagaatggcgtgaacccgggaggcggagcttgcagtgagccgagatcgcgccactgcactccagactgggcgacagagcgagactccct[140 bp omitted]ggtgaaactccgtctctactaaaaatacaaaaaattagccgggcgtggtagcaggcgcctgtagtcccagctactcgggaggctgaggcaggagaatggcatgaacccgggaggcggagcttgcactgagtggagatcgcgccactgcactccagactgggcgacagtgagactctgtctctaaataaataaataaataaataaataaataaataaataaatttaaacaaataaaaataaaataattactggtaaataactccatcatgaacaaattgtcaaaagtttccattgaggcaagttttcgtagagatttgccaaattctattggagtctaaaatgtgtacctctctgtgcctgtttttatgtgttttgaggggtttttgggtgtttttgagacagggtctcactgtcacccaggctggagtgcggtggtgcaatcacagctcactgcagcctcgacctcctgggatcaagggatcctcccaccgcaagcctcccgtgtagatgggaccacaggtgggtgccactatgcctggctaatttttaaaaaaatttttagtagagatggggtctcgctatctctcccaagctggtctcaaactcctgcgctcgagtaatcctcccgacttgggttcccaaagtgctaggattacaaggctgagccactatccctgtcctgattttatgtattttaatggttatttctctcagaatgctgttgaaaccatattgaaacattaaaagtagatatattaaaactcacaacattaagaatgtattctaggccgggcgaggtggctcacgcctgtaatcccagcattttgggaggccaaggcgggcggatcactgaggtcaggagttcgagaccagcctggccaacatggctaaaacccatctctactaaaaatacaaaattagccgggggtggtggcacacgcctgtaatcctagctactcggaaggctcaggcaggagaacagcttgaatgcaggaggcagagcttgc[132 bp omitted]tataaaaactagctgggtgtggttgtgcgcacctgtagttccagctacttggaaggctgaggtgggaggattgcttgagcccaggaggtcaagactacagtgagccatgatcatgacaagcactccagcctgagtggtagagtgagaccttgtcaaaacacacacacacacacacacacacacacacacaacaacaactcactatgataattgtgcttttctggcttttttttttttttttttttttagacagagacggagtctcgctctgttgcccaggctggagtgcagtggcgccatctcggctcactgcaagctccgcctcccaggttcaagccattctcctgcctc[184 bp omitted]gtggcttttttgtgtgtgtgtatttttttttagatggagtctcactcttgtccccgaggctgcagtgcaatggcacgatctctgctcactacaacctccactacctgggttcaagctattctcctgcctcaacctccagagtagctgggattacaggcacccgccaccacgcccagtaaatttttgtattcttagtagagacagggtttcaccacgttggccaggctggtgtcgaactcctgacctcaggtgatccacccgccttggcctcctaaagtgctgggattacaggcgtgatccactgcgccgagcccatgttccctttttataaggacacccatgatattagactacagcccaccctaatgatctcattttaacttcattgcctttgtgaagaccctatctccaaatagggtcatgttcttagatactcaggggttagaattctgacttacctttccggggagtgggacacaagagagggattagccattgtttgatgaattgcaactaattaaccaatcccctattgtcggtcttctaatgcttccctgttaactaagctgccacgaaatcctggttgctacaatttatcataatgttgcccatttacgtgtctgtttctgcttagagcaaaacccactgaatctaatgagatgtcctcattctccagttccactttctcttctccaattatctttttgttttgttttgagagagtctcgctgtgtcccccaggctggagtgcaatggggtgatcgtggctcactgtaacctccgcctcctgtgtttaatcaattctggtgcctcagcttcccgagtagctgggattccaggcgtgccaccatgcccggctaatttttgtatttttagtagagatgggttttcgccacgttggccaggtggatctcgaattcatgacctcaggtgatccactggccacggcctcccaaagtgctgggattacaggcatgagccactgcacccagcctccaattctactttgagctaaggtgactatacacctggctttggctaggacggtcccggtttatgcccccaccccctcagtgccccctttcttgctcaaaagtgtgttgattgaccaggcgcagcggctcacgcctgtaaccccagcactttgggaggccgaggtgggcggatcacctgaggtctggagctggagacctgcctggccaacatggcgaaaccccatctctataaaaatataaaaattagcctggcgtggtgtgtgcctgtaatcccggctacttaggaggctgaggctggagaatctcttgaacccgggaggcagaagttgcagtgagccgagatcgcgccattgcactccagcctgggtggcagggcgagactccatctcaaaaaaaaaaaagggtcctgattttgactataaattatagggtcgctctgtcttgagcttcaacacagactcccgcatccaccactccccagaaactcttctcactgatgaccctcctgcatccggttccaaggtcagtctctccgtcccagtcctctccatggcatctgacccgccggatccctcctgctccggggagctctgtcctcagaccatgcacttccctccaacctgtctgggacatccttcagtcttcccttctctccattgctggccaagggctgagtcctccagcctcctccctcctccacccacacccctccccagcgggctccaaaccccgtctacagccagcatcgcctacagtctcatctccagcctgagtctcccttgaagtccagactctgttcagcagcccctgatgtctccacatggggggctcatggggtctcacattcaacgcagtcacattgggccccactggacccccaaaccattcctcccatgtccaccacctaggctgagggcaggtccgtccttccagggactcaaccagaacctgggagtcaccctgggcctctactctcccacccatatccaatcactcagtaaatttgattaacactgctttcaaaatgcacctagataggccgggcgcggtggctcacgcctgtaatcccagcactgtgggaggcccaggcgggcagatcacctgaggtcaggagttcgagaccagcctgacctacatggagaaaccctgtctctactaaaaatacatagctggccgtggtggcatgtgcctgtaatcccagctactcgggaggccgacacaggagaactgattgaaccgaggaggcagaggttgcggtgagccaagatcacgccattgcactccagactgggcaacaagagtgaaactccttctcaaaaaaacaaaaatgcacctagaatctaatcactgctttcccactcagtgcctgttccctggtccagcctccagcacagctcacctgagccaacacacagtcacccctacctggaccccagttcctgccctcaccccccacaggctgtctccccaccagcagccaccagagggtgcttttgagcacctgagtcacttcctatccctcctctgctcacaaccctccatggctcccacctctctcagggtcaaagcccaaggcctccccatgtctcaccaggtctggcatgacctgccccatcccctccctgccctctcctcttccctttctccccattgctcactctgctcctcctcactgttcctccaacacaccaggtgaagtcctgccgcagggcctttgcacaggctgtgccctctggtggacccaggtatttccaaggctcactccctctcttccttcaaaccttggttccaaggttacctcctcagagggcctttcctgcctgagcctggctaagtggtagccagtcctacctggccttggaactcacaaacttggtacctatcatttatacatgtccttccagggcggcgcagtggctcacgcctgcagtcccagtactttgggaggctgagggtggcagatagcttgaggcctggagttcaagaccagcctaaccaacacactgaaaccctgcctctacaaaaaaaaaaaaaaatacaaaaattggccaggcatggtggtgcatgcctgtaatcccagctacttgggaggctgaggcaggagaatctcttgaacctgggagggggaggtttcagtgagctgagatcatgccactgcactccggcctgggtgacagagcaagactctctctcaaaaaaataaaaataaagatgtcctcccaatggctttttagtctctgaaataatcacatttgtagatctgtttgctaattttgcctccatttccctagccaggctatgagcttcactagcagtattttttgttatttattttagtccattttgtttcctattgtgtcactaagtctcagtaaacatttgttgaaattatgaacaaatgcacagccggccaaaggagagaaaaggcctggggtttggagatggtagtgaagtaatacaggtggacttcctggtggagggggcgaacctgggagaacatgttacctcccccagaagccccatcaaggcctgagaactcattaatctgccaaaacccaaccaaccaaacaaacaaaccaaacactcctttaaaactttttcttggggccgggcgcggtggctcatgcctgtaatcccagcactttgggaagccaaggtgggcggatcacttgaggtgaggaatttgaaacccacctggccaacgtggtaaaaccccctcctctaccaaaaatacgccaattagtcagtcgtggtggcgcgcgccggtaatcccagctacttgggaagctgaggcaggagaatcgcttgaaccagggaggcggaggttgcagtgagccgagatcgcgccattgcacgccagcctgggccacagcgtgagactctgcctcaaaataaaataaatcagccgggcgcggtggctcaggcctgtaatcccagcactttgggtggcc[134 bp omitted]aggc[138 bp omitted]tccttgaagctctctcagggcagccaacatgctgtgcgactcctggcaagttacaccattcagtgcctatttgcctgcctgaagtcaggtagatgtttcagaggtggctacttcacagaggcggcttgtttaaaaggaacaatagttccctctttccactaggtgtcagcagaagcacagctggcctcactcggcatctctccacccctacccccgtaaccacccccgtcccatcctctccatctccactccgggccccagacctcagcatctcaaattcagacacttccctccctcagtagacacccttgtatttgcagacaaattcctgtccccaggcaggccttcgcagcaggcatggttggtggcctgtcctacctggtgtccgatcacaccaggaaacttcagcaagggctgcagagaagaggaaagagcaataaaagaaggaaggtacctagggcctgggtgcggtggctcatgcctgtaatcctagcactttgggaggctgaggcgggtggatcgcttgaagtcaggagttcaagaccagcctggctaacatggcgaaaccccgtatctattaaattacaaaatcagctgggtgtgattgttcacgcctgtaatcccagctacttgggaggctgaggcaggagaatcacttgaacctgggaggccgaggttacagtgagccgagatcgtgccactgcactccagcctgggcgacgagagcgagactccatctcaaaaaagaaggaaagtacatagggattcaatgtttccagccaggaaacatttcatacaaatgtttgtgttcaagaataactttgcatggaatagcggaaatctgtattgaaaattgttctaagaaaatgtcactttttgcctaggtacagtggcttacacctgtattctcagtactttgggaggctgagatgggaggatcacttgagcccaggagttcaagaccagtctggataacatagtgagacccccgtcttagcaaaaacaaaacaaaacaaaacaagacaaaacaaaaaaaaccttagctgggcatggtggtgagtgtctatagtccccactacacaggaggctgaggtgggaggattgattgagcctggaagtttgaggctgaaaatgagctataattgaatcactgcatcccagcctgggcaacagagttagatcccacagaaggaaagaaagagagagggagagagaaagagagagaaaggaaaagaaagagagagagaaagagaaagaaagaaagagagagaaagggaaagagagaaagagaaagaaagagagagaaagggaaagaaagagaaaaggaaagaaagagagagaaagggaaagaaagagagaaagggaaagagaaagaaagagaaagggagagagagagaaagagaaagaaagaaaggaagaaagaaaagaaagaaagaaagagagagagaaagaaagaaaagaaaagaaaagaatggttacactttaaactcatttagttcccccaacaaccccattatgcaggtgctatccagaatcatcattgcccttttaatgggtgagaagacagagggacagggaggttaatttaacctgctcagggagcgacagagaggttaagtaactcaaccaaggtcacccagatcatgagtagcagtattgggattcaaagccaggtggtcaggctccaaagtccatggtgcatgatgagactgcattcaacacagatgaatttcaaggtaatcaaagtaattaaaaataaaataagatataataaaagaccattgaattgaaccagccagtagaagaaccagcctggaccttaaaagggtcatggggccaggcacagtggctcacacgtgtaatcctagtactttgggaggctgaggagggaagatcgcttgaggccaggagtttaagaccagcctgggcaacagggtaagaccctgtcactaccaaaaatacaaaaattagcccgtcatcgtggcatgtacctgtagttccagttactcaggaggctgaggtggaaggaccgcttaagtccaggaggctgaggctgcagtgagctatgattgcaccactactgcactccagcctgggtggcagagtgagaccctgtctcaaaaaaataaagtggggggctgggtgccggtcatggtggctcacacctgtaatcccagcactttgggaggctgaggcaggcagatcacctaaggccaggagttcaagaccagcctggtcaacatggtgaaaccccatatctactaaaaatacaaaaattagctggacgtggtagcacacgcctgtagtcccagctactcaggaggctgaggtaggagaatagcttgaacctgggaggtggaggttgcagtgagccaagatcacaccactgcactccagcctgggtgacagagcgaaaccctgtctcaaaaaaaaaaaaaaaaaggaacaaagagagaaagaaacagagagagaaagagaatgaaagggaggagagagggagtgagagaaatagagagaaagacagcgattccagaaaccatctcactcacttctcgccctccctggcctcttcaacagtagtatttcaactgagtgg[132 bp omitted]accaacatggagaaatcccatctctactaaaaatacaaaattagccaggcctggtgacacatgcatgtaatccccgctgctccggaggctgaggcaggagaatcgcttgaacccgggaggcagaggttgcggtgagccgagattgcagcattgcactccagcctgggcgacaagagtgaaactctgtctcagaaaaaaaaaaaaaaattaaatatttattccctcagcatcatatctacaataatcccatttattctcaatgccacagtggcaattcttcgatggatcggccagggagatttgaagtacccgggaagccctcattgtactacatctttgtaattttcattgatttatgaaacgatgcctgttgtctgcagcccctgctaacacggtcctctaagattactgccatttgggggtgtttaaatctatcatacatggtactataataactacaaccttaacagcaga[187 bp omitted]tggtggtgggcacctgtagtcccagctactcgggaggctgaggcaggagaatggtgtgaacccgggaggtggagcttgcagtgagccgagatggtgccactgcactcccgcccgggcaacagagtgagactccatctcaaaaaaaaaaagaaaaaagaatttaatcctcggcaaccaccctatgaggtgtgattaatattattgtttgtttgtttgggtttttttttttttctttttctttttatacacagggtcttgctctgtcgcccagaatggagtgcagtggtgtgatcgtggctcacagtagcctggaactcctgggctcaagtgatcttcatgcttcaatctcctgagtagctgggagcagagacacatgccccaatcactgaaatttgccccaaatcactcatataggggcagggtcaaaacacaaacctgtttctctatgagggctgtgtcctgtgtccacattatcacttaatatcagtgagtttcacctgggggtgattctgtccccccacaggggacacttggccatgtctggggacatttgtggtgggtgcccctggcatggagtgtgtggagtccagggatgctgctcagcatcctgcactgtccagggcagcccccaccccacaggatggcccaggcctaaatgtccacactgccaagggggagagagcctggcctggccctcagctcccctccagcggcccctagcccctatgacccaccatgggtggtgaggcttccctgtgttgctggccttgcaggctgcacccctgtggttggtttcccttagctctccccacattcctataggtggaactcctttctggtacccagtctggaacagaccagcctcgttccgccgtccccctttgggaggccaaggcaggaggatcctttgagcccaagaggttgtggctgcagtgagctgtgtttgtgccactgtactccaccctgggcaacagagcaaga[142 bp omitted]tgaaaccctgtctctactaaaaatacaaaatttagccaggcgtggtgtcacacgcctgtagtcccagctacttgcgaggctgagacaggagaatggcttgaacctgggaagcagaggttgcagtgagccgagattgctccattgcaatccagcctgggcaacaaagcaagactccatctcaaaaaaaaaaaaaaaaaaaaatatatatatatatatatatatatatatatacacacacacatatacatatatatatacatatatatacacatatacatatatatacatatatacacatatacatatatatacacatatatatatacacacatacatatatacacacacatatatatatatatatatatacacacacaccatcggctaggcatggtggcttacacttatagctccagcactttgggaggccaaggcaggaggatgtctagagcccaggagttaagatcagcctggcatcacagtgagaccaatctctacaaaaaattcactggcatagtggcgttcgcttgcggtcccagctacttgggaggctgaggcgggaggatggcttgagcccaggagtatgagaccagcctgggcaacatagcaaggcccggtgctctacaaataataaaaaaatgagacaggcatggtggcacacacctgtggtcctagccacttgggaggctgaggcaggacgatcacttgatcccaggaggttgaggctgcagtgagctttgatcgcaccactgcactccagcctgggaacagagcaagaccctgtccctaaaaaaaaaaaaaagaaaataaaaaaaaaaagagagagacagagagagaatgacagggaggggatagccaaggaaggggtgaggccagaggtgtctccagttaaaacaggggcagtagtctgatttgcagatgccaccatggtgcagctgggcatgcaatcccctggcagggttcaatgctatgcccatttcctagaaggcaaaactgatactctgagggcagagctgttctattctttccttccttcccctagctggggggaagggagggctccccagaggagaggagagctgggtggcaggggtgggggtgggagagatagctgattaggggcccgtttattagctgtaattgctgtctcctgggctgaattagacgaaattacagccgctggcccttcaggatgtcgagctctcggcattgtctgtggaagcaatccaacggcggaggggagtggagagggggatggggggtgcctcttgacaatagagcccccgaattagccaggcagggaggcggggaagctgcggcctgaccaccccctccccaccaccctaaagagctgtcagagtctcaatgaattcagctccacgaaggccaattaaagatagcagggggcccagtgggctgggacaggaggtgggagaagaggggggagggggaccacatgaaccagggtagggaggtgccagcgaggggtgcccaggtccacagagatctgtgtggagagacaggctgtgggggcatcgtggaccccccaaatattgaagggggtggggttctattcttcctcctcacactaccctttgccccccatgcctgattagaaagatggggttgccctggaagagcaagaggagccccccaggagaagaagagacagtgggacccacccagcaagcactcctcctacctctcccgtggcccttggctggtgttccttggtcaacaagcatcagctgttctgtccctctgttagccactgctcacggggccacttccagtagcatcctgagggaaggccagccacacctcttggaagccctccaggattgcctaaggcctcaccacagagagtctccaatccccaggcaccctcccttccccatctcctctctaatctaacccccgctccccgtcttccaaggaactccccctcctctgtgagccccacctctagacctcctccctttcttgttctttcttttttgagatggagtcccactctgtctccaggctggtgtgcagtggtgtggtcttggctcactgtgacctccacctcctgggttcaagcgattctcctgcctcagcctcccgagtagctgggattacaggcgcccgccagcacgcctggctaattttttctatttttagtaaagacggggtttcaccgtgttagccaggatggtctcgatctcccgacctcacgatctgcccgctgcagcctcctaaagtgctgggattacaggtgtgagccactgcgcccggccagtctctactaaaagtttaaaaattatctgggcatgctgggcacggtggctcatgcatgtaatcccagcactttgggaggccgaggcaggcggatcacttgaggtcaggagttcgagaccaagctagccatcatggtgaaaccccatttctactacaaatacaaaaattagccgggcgtggtggcatgcacctgcaatcccagctactcgggaggctgaggcacgaaaatcgcttgaaactgggagggggaggttgcagtgagccgatattgtgccactgcactccagcctgggcgacagagtgagacttcctcacaaacaaacaaacaaacaaataaaacctctggaccccaaagcttggtggagcttcctgattggtgaacatattgatgttcttccaggagaggagacacactctaatgcctcaagaagaggacatggggccgggcacggtggctcacacctataatcccagcacactgggaggctgaggtgggaggatcacttgagctcaggtgttcgagaccagcctggccaacatggtgaaaccccatctctactaaaaatacaaaaattagctgggtgtggtggcgggcaactgtagtccaagctctggcggctgaggcaggagaatcacttgaacctgtgaggtggaacgctgtgagtcaaaatcacaccactgcactccagcctgggcaacagagagagactccacctcaaaaaaaaaaaaaaaagacatggaagctcttttggggaccctcccagactttgtcctatgtgtctctttgtttggctgtttctgacttgttttgttactttttaaatgtttttttagagacatgatctcacttcgttgcccaggctggagtgaagtggtgagatcataactcactgtagtcttgacctcctggcctcaagagatcctcctgcctcacactcctgaggagctgggactacaggtgcatgctatcatcgctggctaatttttttttttaattttttgcagagatggggtctcactatgttgcccagggtggtcttgaactcctgagctcaaggtatcttcactcctcagcctcccaaagcgctaggattgcaggcgtgagccactgtgactggcctctgacttgtggggttttttgcttatttgttttttgtttttgagacggagtctcactctgtcacccaggctagagtgcagtggcgcgatctcggctcactgcaacctccgcctcccaggttcaagcgattctcctgcctcagcctcctgagtagctgggactacaggcgcccaccactatgcttggctaattttttgtatttttagtagagacggg[147 bp omitted]gtctcactctgttgcccaagctgcagtgtagtgatgcaatcatggctcactgcagcctcaacctcccaggatcaagtgatcctcctgcctcaacctcccaactacctgggactacaggtgcacagcaccacacacagctaatttttgttttttttttttagaggtggagttttgctacgttgcccaggctggtctcaaattcctgggttcagtcctcctgcctcggcctcccaaagtcctgggattacaggcatgagccattgctcctggtgacgaggacagccttgttagggactgtgcccataacttgagtctgttataaccccaggcggttaatgtcagaattgcattgtagagcctgggtaatgtggcaaaatcctgtctttacaaaacatcaaaaaattggcccggcacagtggctcatgcctgcaataccaacactt[134 bp omitted]gaggcagaagaatcgcttgaacctgggaggtggaggttgcagtgagccaagaccatgccattgcactccagcttgggcgacagagtgagactctgtcttaaaaataaataaataagtaaataaaattaaaaaggaaaagaaaataatgtattttatttattattattattattattattatttttattcttcttattatttttttggagatagaatctcactctataccccaggctggagtgcagtggcatgatctcagctcactgcaacctccagctcccgggttcaagtgattctactgcctcagcctccagagtagctgcgattacagacgcccaccaccatgcctggctaatttttgtattgttagtagagatggggttttgccatgttggccaggctggtcaagaatatattccatttattttatattatatatagtacatatgtagagtattagctagagtattctataatgtatagtaatatgtatctattgtctatcatataaatcacatatactcacaccaagagtgtatcttttattttttatttttgtgatgggtcttgctctgttgcccaggctggagtgcagtggcgcaatcatagctcactgcaaccttgaactcctgggctcaagcaatttgcctgccttggcctcccaaagggctaggatgacaggcgtgagccaccacgcccggcctctgagtgcctctgtgttgtgtgtgaagcccagtttgctggaatgttctggtgttacaactgttccagcctgaccgtgtgtggcagtgggagtgtatgtcatgatctgcgcttctgtgactgtgtttcgtggctacatttgtgtgtgtgtgtgggcatgttcgtgggcatgtggaggtacgttcgtgtcccctgtgtggttgtacttgtaaccctgcgtgtgtgtctgtgtgtgtgtgaacccgtgaccatctgaaagtgcacggccgagcttgtggctggggtgtgtcgggcctctgtgctccgaatcctgtcccgaggctgttgcacgtggccttgggcgtcctccagagagacagtcatgctccacggccacgtgcgtgcgtgtgtgtgtgtgtgtgtgtgtgtgtgtgtgtgtggctctggcacatgcctgtgtgaccctgcagggctgtgtccaggggacctagggggacaggagagagctcaggggctgtctgagccgtagggggtgtctgtgattttcagtgtgtgtggccctgtggtgactctgagtggcaggtacatgtgcatttagaagaagcccctggggcccagcctcccccagcccccagccagcctggtgcatgttctcaggacacacccaggcctgaagagctcataagtggagatgagtccccaccagccttgcagtcctccgttccctctcctcctctcctttcctccccctttctcccctcctctcccccttggtcccctctccctgccgagtacaaggggagaagcagcctctgccatcagctggaacacgcttaagtggcccatttcctgggaggctgggtggcctcaccagccattagggtaatgagccgcatgctgtcccccatccagcgccctggtaaccaaggaggggggcattgctcgctctgcagggctgcgttttcctcctcctggcagggatagggatggggagcagggagggagggccctgcagacacagaccaaggccagaggggagggacacagcagagattcacatacaggtcggttggaggcaggaagggaacaagagacagagaggagagggagagacagagccagagatagactgagagcgaaaatggggtggagacagagatagagagagactaacgaccaggcaaggaggaggaagacagggaaatgagagagaagatgtttggggggtgggagagagaaacaggcagagagacagacaggaaaagaaccagacaggtgcagactcacagatcaccagggagatggccagggacaaccgaggcaggaagagagacagggaggcagcaggggcaggcaggagggagagagagaaagaaagagagagcgaatccaaaaaagagacagagacaaaaaagggacagagagagagataaaaaagagacagaggtatggtgacttatgtctggaatcccagcactttgggaggccaaggtgggtggaccatttgagcctatgagcttgagaccagcctgggcaacatagggagaccctgtctctaccaaaaattttaaaaagtagtcaggccgggcacggtggctcacacctgtaatcccagcacttcggaggccgaggtgggcagatcacctgaggtcaggcattcaagaccagcctgcggccaagtgcggtggctcatgcctataatctgagcactttgggaggctgaggcaggtggatcacggggtcaagagattgagaccatcctggccaacatggttaaaccccgtctctcctaaaaatacaaaaaaattagctgggcatggtggcacgcgcctgtagtcccagctactcaggaggctgaggcaggagaattgcttgaacccgggaggcagaggttgtagtgagccaagatcgcgccactgcactccagcctgacgacacagcgagactctgcctaaaaaaaaaaaaaaaaaaaaaaaaggccgggagtggtggctcatgcctgtaaccccagcactttgggaggccgaggcgggcacatcatgaggtcaggagatcgagactatcctggctaacaaggtgaaaccccgtctctactaaaaaatacaaaaaatgagccgggcgtggtggcgggcacctgtagtcccagctactcgggaggctgaggcaggagaatggcgtgaacccgggaggcggagcttgcagtgagctgagactgcaccaaggcactctagcctgggtgacagagtgagactccatctcaaaaaacaaacaaacaaacaaacaaacaaaaaaaccagcctggccaacatggtgaaaccccatctctactaaaaatacaaaaatcagctgggcatggtggcaggtgcctgtaatcccagctaaggaggtcaggagtttgggaccagcctggccaacatggtgaaaccccatttctactaaaaatacaaaaattaggccgggcacgggaggctaagacaggagaatcgcttgaacccgggaggtggaggttgcagtgagccaagaaggtgccactgcactccagcctgggcaacaaaagcaagtctgtctgaaagagaaaaaaaaaagagtcaaggtccatgttacagtcagcctggtatatttatacatcagcacagcaaagccacactgtgacccacatatttggacacaaatgccatcctccttacaggggagtacaacattgcacccctccttttctctccaacccttctcatagcttggtcttcccaggcccagtgacatctcaaggctctgtctctcgacgatctcgcagatgactcattttttgttcctgttctagcagcaatcctgcacacagagtaatagccttccattccctcccacgcctgtccctcctctctgccctcactccagcctcctgatttcatttttctttggatatattcccagaagtgagattgccagatcatatggtaattctagttttaacttcttgagggagaaacctccttaccatttcccataatggctatcacaatttccattttcaccaacagagcaaaagggttcccttttctccacatcctcaccaatgcttgtgatgtcttgtctttttgataacaccactctaacgggtataacgtggtgtgtccttgagactttttctttttttttttgagatggagtctcactctgtcacgcaggctggagtgccgtggcgcaatctcggctcactgcaacctccacctcctgggttcaagcgattgtcctgcctcagcctccccagtagctgggactataggtgggagccaccacacccagctaatttttgtatttttagtagagatagggtttcaccatcttggccaggctggtcttgaactcctgacctcgcgatccacctgcctcggcctttcaaagtgctgggattacaggcgtgagacaccgcacctggcctaatttttgtatttttagtagaaatggggtttcaccatgttggccagtctggtcccgaactcctgacctcaagtgatctgccgcctgcctcagcctcccaaagctctgagattacaagtgtgagccactgcgcctgccccacccccctttttttgagacagagtctcactctgacactcaggctggagtacaatggcatgatcttcgctcattgcaacgtcgaactcccaggctcaggtgatcctccccactcagcgtcccaggttgctgggactgtaggcacgtgccaccatgcctagctactttttttttggtttggtttctttttttttttttttgtagagatgaggttttgccatgttgcccaggctggtctcaaactcctgggctcaagcaatcctcctccctcagcccctcaaagtgccaggattacaggcatgagccactgcgtcctgccagatgaccacccctttgaagtaatttgtttctaaaaatggctgcaattgtttccatcctcttattttttttttttttttttgagacagagtgtcgctgtgtcacccaggctggagtgcagtggcatgatatcgggtcacagcaacctccgcctcgcagggtcaagcgattctcctgccttagactcccaagtagctgggacaataggcgcctgccactacacctggctaatttttgtatttttagcagccttaaagcctggacaggcttggatggcttcaaccaacacgatattgtggaagtggtgctgtgggatttcccaggctagatcggaaaagatcagcagcttcttgtttactggacactggttttcagagctcagaggcagccgggcgtggtggctcacgcctgtaatcctaacactttgggaggccgaggcgggtggatcatgaggtcaggagttcaagaccagcctggccaagatggtgaaaccctgtctctactaaaaatacaaaaattagctgggcacggtggctcacgcctgtaatcgtagcactttgggaggccaaggcgggtggattgtctgagctcaggagttcgagaccagcctgggcaacatagtgaaaccccatctctactaaaatacaaaaaattagccgggtatggtggcatgcacctgtagtcccagctacttgggagcctgaggcaggagaattgcttgaacctgggaggcagaggttgcagtgagccgagatcgtgccactgcactccagcctgggggatagagcgagactccatctcaaaaacaaaacaaaacaaaaattagctcagcatggtggtggcgcctgtaatcccagctacttgggaggctgaggcagagaattgattgaacctgggaggtggaagttgcagtgagctgagatggtgccaccgcactccagcctggacgacagagcaagactccatctcaaaataacaacaacaaaaaacaaacaaaaacaaaacaaaacaaaaaaacacagagttcagaggctcaggcctcctcagaccctttcccccacagcgtctccacctcctggttgggcctgactgctgtttctcctctccttgtcctcatgtctctgtctctggtggggttttggactcttgtttctttccgaggtggatttctgtggttctcttggtgccttctgtctgggggtcaggatcaagctctctctgggtctctccctgtctctgctctgtgtttctctgtgtctctgtttctgtttgctttggggtcttttgctctgtgtctctgatgctctctgtctctgtctctctctgtttctttgttgttgttgttatttagagatggagtctcgctgtgtcactcaggctggagtgcagtggcgtggtctcggctcactgcaacctctgcctcccaggttcaagtgattgtcctgccccagcttcctgtagctatgattataggcgtacaccaccacaaccagctaatttttgtgtttttagttgagatggggtttcatcgtgttggccaggctgttcttgaactcctggccttaagtgatcctcccgcctcagcctttcaaagtgctgggactacaggagtgagccactactcctggcctggggtgtcttactctgtgtctctaactgtctgtctctgtctctccctgtatcttcgtatctctgtttgcatctctctctctagatctctccatctctgtccctgtctctctccatctctctgtctctctgcatctctatgtctctgtctccatctctctacatttttctcttaatctctgtctctgtctatctctgtttctgtctttctgtgtgtttagtcttgcctctgtctctctgtgttttcatttctctttttctctctatctctctgtgggtgtctctctgtgtctctccctgtatctctaactgtctgtatgttcagtcttgcctctgcctgccctctgccccacctggctctctctctctctgcatctctgagcatctgtctccctccccacctccacaccccttcaaattctcgacccccgggctttgaggaggacccccgacagtggcagatattcagacaaccagacacccttgagctactctgcccctaactccccagactgccccaggagattcgatgccactgacttttttgctgcacctcgattaaatttcctctcctccaccggtgaagcccacacctttcctaatgcagcctgaatcctgggctgcactccacattcccagcctactcccgggtcaccagatgcccgcctgcacaatgcacccctgcacctgcctgggttgcccacctgagccccgcccctccccaacacagcgctggggtcgtcatctccacctgggacgcttgggggcatcaacctgagttctcagtgaaagtcttatttaaaaagccttcagtgatttgtctagattcttccgttttctcctgcttgttttgagaacacacacacacacaccatgtgtgaaattcgtatttctttttctcatctccagactttttaaaaactttctattttaaaaataatgataggctgtacaggaagttgcaaaaatagcacagccagcccctgtacccttcaccccgcttccccctggaatagcgtcttacataactcaaataattctcaaagccggaagcggctgtgggcgccacacctgctccctcgttggcagagctccatttccagatttttcacattaagcttccctcttgcacacacccctgagtatgtgtacgtacacttctggagtcacacactgcacctgacccacactcacagagtcacatgcctacatccaagcacacgagttgctcacacacagtgacgtgcaccacatatgtacaggcagattcaaatacctacagaggccaggtacagtagctcatgcctgtaatcccagcatttggggaggccaaggtgggaggatcacttgagccaggagtttgaaaccagcctggacaacatggaaagaccccatctctttaaaaaaaaaaaaagaaagaaagaaagaaaagaaaaagaaagcaggtagagtgatggggctcacgcctataatctcagcactttgggaggctgaggtgggtggatcactggaggtcaggagttcgagaccagcctggataacatagtgagactccgtgtctacaaaaaataaagagttagctgggcgtggtgatgcgcacctatagtcctagctactcaggaggctgaggcgagaggatctcttaagcccgggaggttgaggctgcagtgagccgtgatcacgccactgcatccaacctgggtgatagagcgagaccctgtcttaaaaaaaaaaaaaaaaggtagagtgtggtgcttcacacctgtaatcctagcactttgggaggctgaggtgggtggatcactggaggccagaagtttgagaacagcctggccaacatagagaaaccctgtctttcctaaaaatacaaaaaaattagccaggcatggtggtgcatgcatgtggtcccagctacttgggaggctgaggcaggaggatcacttgaatccagcaggcagagactacagagagccgagatggcaccgctgcactccagcccgggtgtcagagccagaccctgtctcaaaaaaccccacaaaagccaaaaaacaaaagacaaaaaaaaaaaaagactgtagaaaaggacaggacacggtcacagcacagatacacacacacacgcgaccaattacatggtgcatggaaatgaaccctgttgtgcacacacagctctgaatacctttgttaaagtgcccacacacacatcacatccatgcagagacctacacgtggggttgcaatgcagattcaaacagctacacaaatatgcatgcacacagtcacactcatgcacgcacacacacacacgcgcgcaccaccccacgtccacactcacagtcatacatgcgcgtgcacacacacacacacacacacacacacacacacgctgccttgctggtaccgtaacctgtgctggaaaaatctgcacagagaattatgaatgtcatctgcgtccccgcccccaagccgtactagtcaccatggtttcagtaggatgctgtctgtattaggcagtctctctctctctctctgtctctctctctctctctgtctctctttctctgtttgtgcgtgtgtgaagaaaacagaaaacatttgctgccttggtgtaagtttgtccagctttggatctgacagacatagaatatactcaatgttctggaagggaagattaacgcagctgtagcaaggcctgcagtggtcacccgtacagagccctccccagctgtgtccttcttctagtgtaagagaaataagatgggggaagatgaggctcagcgctggtctcccaggctccaaagctggtgctggggccatgaggccacccggccccctcacccctgtttgtccctctgaagaaccctggacactgagttctttcttgggcccagcctctcac[144 bp omitted]gcctcctgagtagctgggactacaggtgcccaccaccacgcccaactaattttttgtatttctagtagagatggggtttcaccgtgttagccaggatggtctcggtctcctgaccttgtgatccacctgcctcggcctcccaaagtgctgaggttacaggggtgagccactgtgcccggcctgaccctccctttttttttttttttttttttgagacagggtcttgctgtgtcacccaggctggagtgcagtggcacgatcacagctcactgcaacctccgcctcctgccttcaagcaattcttctgcctcagcctccggaatagctgggattacaggagccaccacgcctggctaatttttgtaattttagtagagacagggttttgccatgttggccaggctggtctcaaattcctgatctcaggtgatctacccgctttggcctcccaaagtgttgggattgcaggcgtgaaccactgagtccagactcaacacataatttcacttgtctttttcgtattacatgagtacacattccctgtttaattttttttaattttaattttaattttttttgagacagagtctttctctgtctctgggagccacattgcccagcctcaataagtaggtttaaatttttttttttcattttcagaaacagggtctcactctgtcacccaggctggactgcagtgacatgatcatagcttactgcagcctcagactcctgggctcaagtgatcctcccgcctcagcctcccaaaatgctgtgattaccaggcatgagcccagcaataactatttgttgaatgaaaatgaattagaccgctgggcgaggtggctcacacctgtaatcccagcacgttgggaggccaaggtgggtagatcacctgaggtcaggagtttgagaccaccctggccaacatggtgaaaccctttctctactaaaaatataaaaattagctgggcgtgatggtatgtgtctgtaattccagctactcaggagtctgaggtgggagaattgcttgaacccggaaggcagagactgctgtgagctgagattgtaccactgtactctacctgggccacagaccaagactctgacaaaaaagaaagaaagaaagaaagtaaagaatgaaaagaagaaagaagaaagaaaaaaggaaagaaagaaagaaggaaggaaggaaggaagga[140 bp omitted]tgaagaaaccccatctctactaaaaatacagaatcagccgggcgtgatggcacatgcttgtaatcccagctactcgggaggctgaggcaggagaatcgcttgaacccagcagggggaggttgcagtgagctgagatcgtgccatgcactgcagcctgggccacagagcaagactctgtctcaaaaaaaaaaaaaagaattagaccactggacaaacccaaaccaaaagatcatctacaaaccctgtctcctgacaaacattcccggagagggcacagtctctacccaccttccagttgactacccctggtgcagacaccttgaaccaaactccctctgtttttcagcccacgaattggcatcacaggtgagctgggagactctgtaaggccatgacggacatggggattatcagcatccgtcctgatcaaccaggcctcatttccaggccccacacctgctcagggccggcagcagctgagcagagctgaaacttgagcccctatactcacagcttgcgacagacgcacccagacctgtgcagacacagctgatgaaccagaaacagtccctgggaagccccagcagccccagaggctggcggcatgtctggccacaatttgggaaatattacacttgtgggaccagagaccttga[132 bp omitted]gaaaccccatctctactaaaaatacaaaaactagtctggcatggtggcatgtgcctacttgggaggctgaggcaggagaatcgtttaaactcaggaggcagaggtttcagtgagctgtgatcccgccactgcactccggcctgggtgacagagtgagactttgtctcaaaaagaaaaaagaaagggccgggtgcggtggctcatgcctggaatcccagcactttgggaggccgaggtgggcggatcatgaggtcaggagatcgagaccatcctggctgacacggtgaaaccccatctctactaaaaatacaaaaaattagccaggcgtggtggcgggcgcctgtagtcccagctactggggaggctgaggca[137 bp omitted]tggtcccagcactttgggtggctgaggcaggtggatcacctgaggtcaggagttcaagatgcaggggaggtaagtccccaaattgggtcttagcaggggagggttttttactttgcccaggagagaattcagggcaagctggtggtgttagcaaccttttttttttaaaacggattctcattctgtcgcccaggcaggagtgcagtggcgtgatctcagctcacagcaacctccacttcccgggttcaagcaattctcctgcctcagcctgctgagtagctgggactacaggcgtgcgccactgcgcccggctaatttttttttgaaatggagttttgctcttgttgcccaggctggagtgcaatggttcgatcccggctcacagtaacctccacctcccgggttcaagcgattctcctgccttagcctcccaagtagctgggattacaggcatgtgccaccatgcctggctaattttgtattttcagtagagacaaggtttctccatgttggtcaggcaggtcttgaactcctgacctcaggtgatcctcccaccacagcctcctaaagtgctgggattataggcgtgagccatggcagctggcctaatttttgtatttttagtagagacaggttttcaccctgctggtcagactggtctcgaactcctgatttcaagtaatccactcaccttggccttccaaagtgctgggattacaggcgtgaaccgccgtgcctgaccgtggcgttagcaatcataattgcagcggccgtataaggagctgcagaagtcctgctccttgcagagtagggctaccccataggcagtgagctcagagcagcagcccagaggcagttctgcaggcgtattgatacccacttttaattatatgcaaattaaggagcagattatgctgacatttctagaagaaaggcagtaacttttgggttgctgggttgttgcaatggaaagggatggttacgtctgggtgttgccatggcaatggtaaactgatatggtacacagatggggaagtactttctgcctttgcctgtattagctagtcctcaatcaggtccgttgtctgggcccacctgtggagtcaagagccccgcctcttatttcaacagtctttaatgcttatggaagttgtgagaattcagtgggttgacaaatggtgagattggtgaatactgaac[138 bp omitted]cctcagcctcccgagtagctgggactacaggtgcccgccaccac[136 bp omitted]cttttaagtgtgttattattccatgaatccagttcatactttctcaatctcggcactaataacatttgggccagataactcttggttggtaggggtggggtcctgtacgctatcgggtgctgagcaggttctaactactccatgccagaggcatgcccggttctgggggtaaaaatgactccagacattgctcagcatcccctggggacagaatcacccccaggtgaggcctctactgatctaggttaagtgattttaaaaatgacaataattgacggaaaccacgatgaggagattagacactccatatccgtgtaactaaaaatcgagagatgtccataaatttcaagctgcaactatgtgtttttaaaaattgtttaggccaggcacggtggctcatgcttgtaatcccagcactctgggaggtcgaggcgggcggatcacctgaggtcaagaggttgagaccagcctggccaacatggtgagacccgccgtctctaataaaaatacaaaaattagccgagtgtggtggtgcgcgcctgtagtcccagatacttgggagactgaggcaggagaattgcttgaaccctgtaggcacaggttgaagtgagctgagatcgcaccactgcacttcagcctgggtgacagagtgagacgccatctcaaaaaaaaaaaaaaaaaattacaaaagatctcttcaaatgtcacacaggcacactgagggcaacacatgttcccagaccacaaaggaaaagagctgtaaagaacgtgatagcgacaggtggcgaagtgtgcatatggattatatattggataataacatcaagtcaacgtgaaatttcatgaattcattgtatcttcatcattatgtaagggaacagccttgttcttagaggtgcccagtcccttccgggcttattaacaataaacagttgtacatattaaaatgttcacaatgggtgaggtgaggaaagacagtacctgagaggtcatggtactcttcttgcatctttt[148 bp omitted]cccgtctttactaaaaaaaaaaaaaaaaaatacaaaaaattagccaggcatggtagcgggcacctgtagtcccacctacttgggaggctgaggcaggagaatggcatgaacctgggaggtggagcttgcagtgagccaagatcgcgccattgcactccagcctgggcgacagagagagactcctctcaaaaaaagaaaaaaaaa[133 bp omitted]acacggcaaaaccctgtatctactaaaaatgcaaaaatcagccaggcgttgtggctcaagcctgtaatcccagcactttgggaggtcgaggcgggcagattgcttgaggtcaggagtttgagaccagcctggccaatgcagtgaaaccctgtctctactaaaaatacaaaaaattactggggcgtggtggtgggcacctgtaatcccagctactcgggaaactgtggcaggagaatcgcttgaactgggg[137 bp omitted]atggatgaaccttgaggacatcatgttaagtgaaagaaaccagtatgaggagacaaacacataattccagttacatgagttccctagaaccggctaatttataaagacagaaagtaggttggaggttagcaggggctggggaaatggggagtttttgcataatgggtacagagtttctgtttaggaggctggaaagattctggagatgatgatggtgatggtggcacaacagtgaatgtacttaatgccactgagccgttcacctaaaaaggattcaggccaggtgccgtggtatgcgcctgtagtcccagctactcgggaagctgaggtgggaccactgcttgagcctgggagtttgaggctgcagggagctatgatcaagccactgcactccagcctgggggacagagtgagaccctgtctcggaaaaaaaaaaaagttaaaatggcaaatttcatgtgacacagtcatgtattaattgataatggaaatacatgggaggctgaggcaggagaatcgcttgaacctgggaggcggggattgcagtgagccgagatcgcgccactgcactccagcctgggtgacggagcgagacgctgtctcaaaaaaaaaaaaaaaaaaaggaaatgcattcagcaagatgtgtcattaggcaatttcgtcgttgcgtgaacatcatagagtgtgcccacgcacacctagatggcacagcctaccacacacctaggctgtatggtagagcctaatgctcccaggctacaaacctgcacagtatggggctgtactgaatcctgcaggcaactgtaacacgatggtaagtacttgtgtatctaaacatatctaagcatagaaaaggtgcaggaaaaatattgtataaacgattaaaaattggctgggtgcggtggctcatgcctgtgatcccagcactttgggaggctgaggtgggtggatcccctgagttcaggagtttgagaccagcctggccaacatggtgaaaccctgtctctactaaaaatacaaaaattagccaggaggggtggcgggcacctgtaatcccagctactcgggaggctgaggcaggaggattgcttgaacctgggaggtagagatcatagtaagccaagatggcaccactgcactcaagcctgggccagaacaagactccatctaaaaaaaaaatcttattgaacaaccatcataattgcagtctgtcattgactgaaatgttgttatataatgcttaacggtacatattttaccacaataaacacacgtagagtaataagatgtcatttccacgctcaggttgtaagacactgtaacttccatcttgttagccgaatgtattgccttctcagttttcaggcttcaataaagcaatccaccacgttgaagagacccctatgtgagtttgcaagtggctcttttccctttccaatcttttttcttttcttttaggtataggatcttgctatgttgccctggctgggatgcagcggctattcacaggtgcaatcatagtgcactacagcctcaaactcctagcctcaagcaatcctcatgcctcagcctccagagtagctgggcctacaggtacttaacacctcatctggcatcccccagtcagatatttggatgagacccctgccttggctaacaccttgatgaaaacctgtggaaggttctaaggcaggtacgacacagaaacagtgagataatgaatatgattattttaagccattaagatttgaggggctgggcaaggtggctcatgcctgtaatcacagcactttgggaggccgaaatgggtggatcacttgagcccaaaggtttgagaccagcctgagcaacatagcaaaaccccatttctacaaaaattttaaaaattagctgggcatggtggtgtgcccctttagtcccatctagtctggaggccgaggtgggaggatcactaagcccaggagacagaggttgcagtgggccctgatcctgccactgcactccagcctgggtgacagagggagaccctgtctcaacaacaacaaaaaagatttggggctatttgttacacagcaataaataactaatacacgtgtgtgtgtgtgttgtttgtttgtttggttttgagacaaagtcctgctctgtcacccaggctctggagtgcagtggcacgatctaggctcactgaatcctcccccccactgggtgcaagtaattcttctgcctcagcctcccaagtagctaggactacacgtgtgccacaccacgactggataatttttgtatttttaatagagagggggtttcaccatattggccaggctggtctcaaactcctgacctcgtgatccgcctgccttggcctcccaaggtgctggggttacagatgtgagccaccgcacctggtccactattttttttttatcattattattagaggaagtttcataaagagaatgaatatgtgggcttttgtagccaatcctagagggtgggagtccctccctgcctcctagcttgtacttgccccattgggagcctcagttttctcatctgtaaaaggcgaatgataacaatgcctgcttctggggcataagaagcatgagatgcaaataaagcgtttcgctcaggctctgcacgtagggagtggtcaggtacaggggccgtggtgatgccgctgatggctagggggacagggactgtctcctgtcttgtctggtgacatccccttctgaacagagacttggagcctgcaggggtttcagcaattgtttgttgatgctgcaagatctctgtgcccctgccgtgtttgtctgtctgtctgtcagcgtgccctaccctctgtgctcgctggcctggttcgtgatcctcgccgtgtcctgtccacccacttggatgtcctgtcatgtccgtggggggctcggagcgactgagctgtgggggccggagactgggagcgggagctgagggagggagggaggagggagggagggaggcagcgcttgcctggccctcatgatcccccctcctcgtctcttgccgaggaccctcagcgcagccacttctccaggcactcggcagagagaacgcgcgtaggcgttgccctggcaacgccgggatgcccagcaacaagtccgcggcgtgtatcacgtgctcggcgcggaccaatccgagggcccgccgggaagcaggtcagcctgggccaaagtccgcctcctccctcgcggcgagaggctcccagctaattaccgtaattgcggtgggagagctgccggatgcgcgggggctggggctgggggctgggcaggccctgaggagctgagcggggagggctggaaaacaggactctcctccaacagccctgccgctgcctccaaccccaccatcgaagcgttcattaggcgcctacagtgtgcacctgctgttggaaggggtgggtttggagtgtttccagtggtggtggggaaccctagcctccagcctgggtaaacctagatttgggggcgcggggaacagatttgactcttaagactcggggtctcatggaaactgtccaatcgccgttggctgtattgaaccaatccccccctcccccatcccgatgggtcacggtttcctcctgcacaaaaatacaaaaagtttaactcttgaagagggtgtattaaaagatttgcctctgggtggacagaattcacatcccgtctctgccatttgcggctgtgtgactctaggtgagtcccttaacctctctgagccctcgactcctcatcagttaaaagaacaaataggaccaggcacagtggctcactcctgtaatctcagcactttgggaggccgaggcaggcagatcacctgaggtcgggagttggagaccagcctggccaacatggtgaaaccccatctctactaaaagtacaaaaattacccgggcccggtgacaggcacctgtagtcccagctactcgggaggctgaggcaggagaattgcttgaacctgggaggtggaggttgcagtgagctaagatagcgcattgtgctccagcctaggtgacagagcaagactctgtctcatattattgagagaatgtgtgtgaagtgtgcagcaagtatttaataaacagcagctaatcatcaccatggtcccagctctcagttaggagctgtgagaccttccaagtgtcatttaatggcactgagccccaactgtttccatagatgaggtgaaggagtgggagaagtggcctcgtgtcagattccctgccactgcagtttgtttcctacacaatgttctctgggttgtttttctttctaattaataatagctcaaggccaggtacagtggctctcacctgtaatcccagcactttgggagacctggcggaggcaggaggatctcttgaggccaggagttcaacaccaccctgggtgacagactgagaccatgtctctaaaaaacaatagaaatttaaaaaaagaaagaaaattagctcaaagtgggggccttcatgtgaaggcatttaaatttctgattcctagactacctgatttttttttttttttttgagacggagttttgttcttgttgcctaggctggagtgcaatggtgagatcttggctcaatgcaacctctgcctcccgggttcaagcgattcc[132 bp omitted]tcggcctctccaagtgcagggattacaggcttgagccaccacgcctggcctagctgatctcttcttaactcctttccagttatttgctttgtttgttcttttgtcgacaagcattaattgagcacctagtgtgtaccaggctctactgtgggtctgagtcctcagcctcgctgtgctgaactcagggtccaactgagccggactgcagggcagcttcgaggagtaaatgagacccttcagtcattcagtgaatttcaggcattgggaaatacagtgccaatagttgtgactatcgcattgaccacaggaagtggcccaggacctcagtggacgggaggacacatctgatcatcgttcattttcaccagtgctgatttcctcctccaggtctttcctcccgctcgctgttccatctttcccggaagactttcctctgagcaggccctctgctcacctgctccgggaacagcaggagcaaagacacaaatggcagagcctctgaggggctcccctgggtgtacccccctccaccactgtggctgccaggaactgtcttcctatctgctcccctcttagaagggcagtcaccagacggcagttgcagagaaggactgtacttggaagttgtttttattgttgtagttgttgtttttgagacagggtcttgctctgttgcccaggctggagtgccgtggcacgataatagctcactgcagcctcaacctcctgagctcaagccatcctcctgcctcagcctccagggtagctcggaccacaggtgcatgccactatgcctggctaatttttgtattttttgtagagtcagggtcttgctatgttgcttaggctggtctcaaactccggcctcaagtgatcctccagtcttggcctcccagattactgagattacaggtgtgatccactgtgcctggcccagaattttgttaatatgcatatttcaggagcctctgcaagctaagaagggagaatacaacttccatgcaagggcctcccaggactcagggctggtgagcaaaccaggtctgcaggaacttggcttgactctgcagcccaaaaggcacattttggaggcttgggtctggtcccacttcagactcaggtaccaaccacagaatttggctgaaagtggggactctggtctcaaaaggcagctctctctgtttctctgctgtgtgagcctgggcaagagtctcaactctctgtgcttgcttctgcccctgggacatggtgctaataagcaccaagcttggaaagttaacgtgaggacgagatgaagagaagagccagcacctagtaggttttcaataaatggtagctggcattatcatttacacagattggggactgattggaaggaagccgtgacggccacagaaccaacagaaagctagaaaatcgcttttgagaacaggcagatgccaagagaagagccattgaggggagcagcaagatggcaggcagggaaatatcaagcctagccccagacagactccgtctttcagtaggactacgggctagcaatccaacctctgtcttcttcccttttccccatctttcaaacaggaacaaaacaacaggtcctggttccctggaggatgagggtgtgagttggaacagatacccttggagaggttccggaaggttccagaaggttctggaaggttctggaaggtccaaatctggacctcatcgtatcattgacaaatatctattggggctcaatattttcaggacacggtgcttcatgttagggctgccagaaagtatggcaagccaagacaagaaacatcaaagacggggataggaaagctggattctagtcctggctgggcctctgacgtgctgtttgagctctctgggcctcaaggaattgaaaagtaggggggttctataataggaaggccacccttcagagcccttctctgccccctgcttgctaggtgtccttggggaaaatgtctccacctctctgggactcagtttccacatcagaacagtgagattcagtcactgtgctgcaggacagctttgaggagtaaattagattatttagtcattcaatgaatttcaggcattgggaaatacagtgccaattaaaatggggcatgacctggctctctatggtctataaaacgcttagcacatagtgaatgacagacaatgagtaccaccattgggccatcatcatcacccgtaaagtgctcggcacaaaatagatgctcagtaaaccctagttagtaatactgcagcagtagttccaggacctacattgcaagattctctcctctcccactgtgtccaaagcattaacgtgccaggaagcaggaactgagacctttattagggattccctgggtggcctcaggtggggagggtgacctgcgtgtggtcctgttttcatgccctgcctcttctaggtaaacgcctctgctaatctccccttgcccaggctgcaggtcaggtttcggggccccaggcagatgttgtccagagtagccctgtttccttaatcctcagggctccagaaattgtccttagaagaaagaacaacagacccgctgaggtcaccatctgtgcagtcttgatttgtaaatgctcatgagggtggcaggaaagaggtctctatagtaacggctgaggaaggggctgcgtgtgtgtgtgtgtgtgtgtgtgtgtgtgtgtgtgtgtgtgtacgcgcacatacagggaggaggaatcacccaaggcccttattcctagacttttcttttctaccctgatgagctattaattaatactcattgctggcttgttattcccagagataattagctactgttcctaactggagtcgtggggccattttctaaatagattcgttcgcctctgcccacccacacctgtctatctcccgggacacaaggaaatgttacagaacacagagacccagagaggagaaaaactgaacaaaggggtctctctgggaagctcagattccaagtgaatagacaagagcagagcctgaatgagcaagggcccagtgcacagaaagttattataaaaatgccagctatagctgagagtggtggctcacgcctgtaatcccaacactttgggaggccaaggcaggaggatcacttgaggtcaggagttcgagacgagcctggccaacgtggtgaaaccccatctctactaaaatacaatcgctctggaaaagtttgacagtttcttatgaagttaaatatacacttcccatatgacccagccgtcaccctcctaggtgttaccctggagatgtgaaaatttatcgcccacatgaaagcctgcatgaaaatatttatagcagttttattcctaataatctccaaacacagaaggtgttccagaacctaatgtccttggactgatgaatagctaaacaggccatagttcatccacatgatggaatactacttaataataaaaaggaactaactccgggttcacacaacagcatgaatggctctccagtgtattctactgaggaaaggaagccaggccaggcgtggtggctcacacctgtaatcccagcaatttgggagaccgaggtgggtggatcgcttgaggtcaggagttcaacaccagcctggccaacatagtgaaaacccatctctactaaaaatacaagaattagctgggtgtggtggcggacacctgtaatcccagctactcgggaggctgaggcaggagaatcgcttgaatccgggaggcagaagtcgcagtgagtcgagatcatgccactgcactccagcatgggcaacagagtgagatttcatctctaaaataaaataaaataataaaaaataaaaataaaaagtagcaaacgtgcatgtgggcggagaatgtacacacttatatatgcatgtacttctggaagggcacaggaaatgaaatgaacaattgataagagattaaaccttggggttggcagactggggtccccaactcccacaccctctccctgtggtccttgggcaagccccttcccctctctagccatctataaaacatgcatatcagccaggcatgatagctcatgcctggaatttcagcactttgggaggccaaggtgggaggattgcttgagcccaggagttcaagaccaacctgggcaacatagggtgaccctgtttctacaaataatttttaaaattagctgggcatagcggtgcacacctacagaaggctgaagtaggaggattgcctgagccaggaggcagagactgcagtgagccatgattgcactactgcactccagcctgggtcacagactaagactctgtcttaaaaaaaaaaaggtctttcttcctttttttttttttttttttttttttttgagaaggagtcttgctctgttgcccaggctggagtgcagtggcacgatcttggctcactgcaacctccttctcccgggttcaagtgattctcctgcccgagcctcccaagtagctgggattacaggcacccgccactatgcccagctaattttttgtatttttagtagagacgaggtttcaccatgttgaccaggctggtctcgacctcctgacctcgtgatttgcccgctttggcctcccaaagtgctgggattacaggcatgagccactgtgcccagtcaaaaggcctgctttcctttctctctctctctctctctctctctctctctctctctctctctctctctctctgtctattttgagatggagttttgctcttgttgcccaggctggagtacaatggtgcaatcttggctcattgcaacttcaaactcctgggttcaagcgattctcctgcctcagcctcctgagtagttgggattacaggcatgcaccaccatgcccagctaatttttgtatttttagtagagatggggtttcaacatattgtccagtctggtctcaaactcctgacctcaggtgatccacttgccttggcctcccagagtgctgggattacaggcatccagccaaaaagaactttctttctttttctttctttctttccttctttctttttctttctttctttctttctttctttctttctttctttctttctttctttctttcttctttctttcttctttctttctttttctttcttttttctctctttctctttctccttccttcctttctttgttcttcttcttctttttttttaacagagttttgctcttattgcctaggctggagtgcagtggcacaatcttggctcactgcaacccccacctcctgggttcaagcgattatcttgcctcagcctcccaagtagctgggattagaggcacgtgccaccatgccggctaattttgtatttttagtagagtcagggtttctccatgttggt[132 bp omitted]ggtctcgctctgtcacccaggctggagtgcagtggcatgatcttggcttactgcaacccctgcctcccgggttcaagcgattctcctgcctcagcctctgtagtagctgggactacaggcacccgccaccgcactcggctaatttttgtatttttagtagagac[131 bp omitted]gccctgaggccttcagatcactcagcaggtagaatgtctggcactgaccctggcacagagtaaaagcttagggaaggggagagagaaagggtggcaggtcttcctgtgcaacctgaggaacttcacttttgtcctggcctgaatgatcaggtcctgtacagctgtccctgatttatatcctaactgtcccttctatgcttgctcaccccccagggcctgttctttcccccacccccaccagggcccttacactgactgttccttcaacccaatgcccataccaacatgtgagcagagttttcatgtctttaccctccctaaaggcaaggttggttgctgaattcatgtatgtatctccagtgcctagtacaacaagtttgttgagcaaataaatgggtggaatagatcaggaaagaataacagctgcattattagaaaacttaccgtaaacagacatgattgctagtgccatgccaagccatattgggacctcaggcaaaaggaaaagtcagaaaggctggttctgcctttatttacatttttgatattttgttcattgtggattttggcatacattttgatttcttaaaacattgcatcgatttttttttgagacagggtcttgctctgtcacctaggctggagtgcagtggtgcaatcataactcactgcagcttcgacctcctggcctcaagtgatcctctcacctcagcctcccaagtagctgagaccacaggtgccattctctctctctctctctctctctctctctgtttctctctttctctctccctctctccctctttctctctcagaaacggggtctcactatgttgcccaggctcatcttgaaatcctggcctcaagtgatcctcccaccttggcctcccaaagtgctcagattacaagcatgagccattgcacctggcctgaaatattatttaccttgattattgagttttttggtgcccctttaagttttgcacctgaggctggtgcctcacccaactcacattagcccctgccctgattatttctaacatgcaatccacaccatatcattagttcctcagcaaatactctactattatcactacttcacagttgcaaaaactgaggcacaactgtgcccaatgtcccaaaggaaggagaagaaaaatctgaacttgaaccccagtttcttcgttttttggttcagagcctgcccagtatagcactacaataagctgaattttataaattgggttttgagttaaggaatcaaaagcttcaggcttaagtcccacctctgccccagagtcttctgagccctccattttcacagacgtcagttgccctaggtggaactggactttaatattctccacatcccttattttttcccaaaacagtttaccagctttttctttcctgaaccaggagcaatagcaaaaattgggaatgggaagaaacaggtaccagccaggacacctgaacgaacttggagctcaggaacccaggaggggattggagagagtggggagactccatggtccacaatgaatgctccttccccatccgaaaaaatcccctagcccagtttttgggcagatgccagacttttattctgaagcgtgggccacaacctatgaggtaatctttggagcttcattctgaggcggaatcccattggccagttggggaagcccctcccaggattcctggcgctccgccttccctgaagcctataaaagcgcaggtccccgcctcggcagccacgggacacctgcatctgccaacaagactggaagcaggtgaggcacacagagggggaggcccgcagctgcgtgggaggaggggtggtctgagggacgtgggatgccgggaatgaggctggtttgcaggttggcgcatggacattttcccagaaagggacagagacggcgaagtttgacggtctggaaagcagagaccagcagggctgactgcttgggaggtaagttctggggacatggtacagggtgaggagcaggtatcagtgctagttgcgacccctctgtgtctcccccccgccaccccattgccattctgaagctccccaggaagaagctaggaggggaaataaattgagtgggggtggggtttcccaagaatcggaggaaccgagaacgaagaggggtgggggaacggggaaagagagaggaaaatcaagttttcttcagcacgagggacagctctccaccgaccgaaggaggagaatgctatttatttcagcaccaaatatccggacagcgcctctcgggaggtccgagaagagaaccgcgatctgtttcagcaccggggctcaggacagttcccagcgggctccgtttcgtctccagaaccctggacagctcctccaggtaacgggagagccctttgaccctgattttgcagggggaggacgagagagggtggtctgaggtgcctggcatttctggagacctgcacctcatgtaatggatttttaaacaaagtattttccagataagcacacacagaagtctgcaattttctttttttttcgagacggagtcttgctctgtcgcccaggctggagtgcagtggcacgatctcggctcactgcaacctctgcctcctgggttcaagggattctcctgcctcagcctcccgagtatctgggattacaggcacatgccaccactcccggctaatttttgtattcttagtagagacggggtttcaccatgttggccaggctggtctcaaactcttgacctcttcatccgtccacctcagcctcccaaagtgctaggattacaggcgtgagtcactgcgcctggcccaagtccggaattttcaacaggtaagatacctcactggggtaacagctgcctgctaagatgacattatggtgtctcttccagacttcggtgagaaaccttgtgccaagcattttacatacatcatatcatgccatcttcaaccctaggacatgggtgttactgtgcccatgtgacatttggggaacccaaggccctgagaaaggcagaaaaataacccacgcagggactctcagcccacaagtgaagctgtaagtcaaccccaccagtccaactccaaatcccatgtctctgacgtgcctgggtgggaggtgggcccttggagatcagaccctgcttctctccaggagaaccgggaatggaaaacagggaggcagcacagaggcaggaaactcaggtgtcatagcttggctcaggtgagaaggaggagctgggcaggggtctcagacatggggcagagggtggtgaagaagattagagtggctgtggtctagtgctgtgtggaagactagtgattttgttgttctgatgtactacgacaacaagtcacagccggcctcatagcgcagactcccttcgaccttcgccttcaatgggctggccagtgggggagaaccggggaggtcggggaagaatcgcttccactcggagtgggggggctggctcactccaggcgatacaggcacaggcaaaggagggaagcaaacaaggacatacatcctgtgctcatacagccatgcaccatgtatggggtttgtcacatcactcgtacgcccccacaagcctggagatagaacatacctgactctaaacccaagacctctaaccaccttatggcgctttcctgggagacccaatgagggaatgacatttaaagccctccctagaccagagttctcagggtacttttctattaaaaaaaaaattattatttttttggccgggtggctcacgcctgtcatcccagcactttgggaggccaaggcaggtggaccacttgaggccaggagttcaagaccagcctggacaacatggtgaaactccatttctcctaaaaatacaaaaattagctgggcgttgtggcacacacctgtagtcccagctactcgggaggctgaggcatgggaatcccttgaacccaggaggcagaggctgcatgacccaagattgcaccactgcactccagcctgggcaacagagagagattctgtctcaaaaaacattttttttttcttttttgtaaagacatggtctcctgcctcagcctctcaaagtgccaagattacaggtgtgagccaccgaacccagcctaaggatacttttcaataaaagttccagaagtgggctgggtgtgggagctcatacctgtaatcctaacattttgggaggatgagatgggaggattgcttgagtacaggagtttgagaccagcctgggcaatatagtgagaccccgtgagttgacacatgcctgtagtcccaactacttaggaggtgggaggaacacttgagcctgggagatcaaggctgcagtgagccatgactgcaccactgcactccagactgggcaacagaacaacaccctgtttcaaaaaaaaagtttcagaaaagattcctttcctgtctgctacccatcagtgtcatgggccaatcataggacaagtgtgaacttgtgcccagtggtgacttatgacatcataaaggctcaccacctttgccagacatggtggctcacacttgtaatcccagcactttgggaggccaaggtgggaggatagcttgagctcaggagttcgagaccagcctgggcaacatagcaagacctcatctcagtaaaaaataataaataaataaataaatatataagactcactcccaattctctgcaacaccctaatcaagtgaaaaactgcacatggttacctgttctccagcctcagggcttttgcctctgctgttcctgcagcttggaatgcactccctccacctccaaccagagctccccacaactgaccctgccttcttctgcaagctccatttcatcaagggaaacgatccttattgcctcaccatttcccacgtgaagtctgtattgacattctcatagacctgggatattgtgtctgcagcacatagtccaattattttcatgttatctactgacaggtctatttgtctccctgttacactgtgagctccgtgagggcagaaacaatgttagtattttcactgctgtgtccccagcgcctggtccggggcccggcacacagcaggcatataataagcatgtgttgaatcaataaaggcatcaaagaataaaccaatacatcaatcaataaatgaatgaatggcctcagcacacacaggaagatccttcttctaggtctcccccagagagatactggagggcaatggttgctggaggtgtttattggggaagcataattgaatttgtggacacttaagggccggccagccaactcacagccccaagagagagagccaggctcatttaattagcaattacaaggcactgattcctcattagctctggcaaccctcgtctccctcctcagccccagacaaatgaaatctttctctctctcccaggagtactgcctcagtgggtccattaacaagcagagaaaatgagattagaagacacctaaatgccagaggcactttatgaatgggctgagcagagggaggttcaatgtctgggttaggtctaattgtgggaggtttcctggtctatttagaattgccccctgggaatgcaaggtctttcagaaaggaaaaggcacacagatattgccttctggggtcctcaatggaggaggacattctgctatgggtgtctcccagtcaccccaaattaatcatttcaaagtgaacactcaatctgcccagcccctagcttcctcccctgacatgcccatgaatatgacagtccctctacatgcccaagatcctcccctcctcatccactccccatgatccccaagatgagtcactgtgctcaaatccatcctctctcctccagccctctgcctccatgacctccctccagccctctgcctccatgacctccgcctccctgcatgtccggatctcctcactgtctcccctctgagcatacacacacatacagcctgttcattctctacatgcagcgaggggactttccagaacacacatctgaccaagttccactcctgcctgtcacccttccaagagccccactgactgcagaataacgttcaaatatccggttgggcgtggtggctcatgcctgcagtcccagcactttgggaggccaaggtgggtggatcacttgcacaggaccacaggcgtgtgccaccacacccagctaatttttatatttttggtagagacggagtttcaccatgttggccaggctgacctcaagtgatccacccgcctcaacctcccaaagtgctgggattacaggcatgagtcactgcaccggtctaattttttcagagtctcactcttgcccaggctggagtgcagtagcatgatctcggttcactgcaacctctgcctcctggtttcaagcgattctcttggctcagcctcctgagcagctgggattacaggcacgtgccaccacacttagctaatttttgtatttttagtagagatgggggtctcaccatgctggcacagttggtcttgaactcctgacctcaagtgatccacccacctcggcttcccaaagtgctgggattacagacgtgagccaccgcgcccggccagcctttattgattctttttaaagccacactaaccttttattttcccccaaagacccctgggagccctcagtttttcctggcagtttcatctttgtacccctgacctccccacacacacgcctagctcagtgctggcatccaatattcactttgggtataaatgcttgtgcctgagcctatcaccttcatcacacagaaaatcctggaggccacacacccctgtaaagacgagccattacccacagaggtccaaccaacttaccaccctctcccagccacccccaaggacccagcttgcagctgcctgctcaatggctttagaaactaaaaaaggtgaatgagtttccatcactgccctcctgggctttgccgttatggctggttaacttgacagaagaacacattatacttcattttttgctgttgtcttgttggaaaaaaaagtgacagctgggtgcagtggtgcacactgtagtcacagctactcaggagaattgcttgagcacaggaattggaggctacactgagcaatgatcgcctcactgcactccagcctgaacgacagagcaagaccctcttaaaaaatacgtgagagagggtgcgtatgatggctcatgcctgtaatcccagcagtttgggaggccaagacaggtggattgcttgaactcaggagttcaggactaacctcgccaacatggtgaaatcctgtctctaccaaaaatacaaaaaaaaaaaaaaaaatgtcgaacatggtgtcacgagcctgtagtcccagcttctcagaaggctgaggtgagaggattgcctgagcttgggaggcggaggttgcagtgagctgagatcgcaccactgcactccagcctgggtgacagagcgagaccccatctcaaacaaaacaaaacaaaacaaaacaaaaaaaacgggcatgatggctcacacctgtaatcccagaacactttgggaggccaaggcaggcagatcactaggtcaggagatcgagaccatcctggctaacatggtgaaaccccatctctactaaaaatacaaaaaaaattagctggccatggtggcgtgagcctgtagtcccagctactcgggaggctgaagcaggagaattgcttgaacccgggaggcggaggttgcagtgagctgagatcgtgccactgcactccagcctgggtgatagagcgagactctgtctcaggaaaaaaaaaaaaaagtgtgagagagacccccttctcccctggccatgagcaattaaattatgattttaatcacccagagttaagtgtcagaatccacaggttagccaggtgcaatgtctcatgtcctgtcatcccagctacccgggaggctgaggtgggaggatggcttgaggccaggagtttcataccagtttgagtcttactatgttgtgggcaacatagtaagactcccctctcttaaaaaagaaagaggaggctgggcgcaatggctcatgcctgtaatcccagcactttgggaggccaagacgggtggatcacctgaagtcaggagtttgagaccagcctggccaacacagtgaaacctgaatctattaaaaatacaaaaattagccgagcgtggtggcacacgcctgtaatcccagctacttgagaggctgagctgggaggatttctttaaccaggaaggcagaggttgcaatgagccaagattgtgccactgcaccctggcctgagcaacagtgagtccgtttcaaaaaaaaaaaaaacaaaagcagtcactcctcattcttcttcccacactccagcccctggcaaccatttatctgatttctatctctctggattggcctgttctggacatgccatagaaatgggatcacacactgtgtggctttttgtgtctggcttctcccacctgagcctgacgtcctcaaggttcttgtagcctgtgtcagagcctcattccttttcatggctgagtcatattccattgcatggatataccacattttccttatccagacgctgttttgatggctttagacacatgatctcctgcgaggttggtggtcttattgcaccctattttgcaggagaggaaactgaggcccagggaggtcaagcaagttgctcgaggttgcacagctgctggtggcatagccaggacttcaatccaggcagtatcatctagggtctgcaagttgaacccctaccttctacccctctaacagtttagtattcagagactatgtagcaattattatcattttttaaaaaatggagtctcactctgtggcccaggttggagtgcagtggtgtaatctcagcccactgcaacttctgcctcctgggttcaagtgattatcctgcctc[134 bp omitted]cggcctcccaaggttctgggattatgggcgtgagccaccgtgcccagcccaatccaggcagtttgatccagtctgcaagttgaacccctaccatccacccctctaacagtttggtattcagagacaatgtggcaattgtaatgtatctctatcattttcccagggaaggatgccaagacacagacaggagtttgtggcggtcacccagtgaatcatccccagctagggctggaactgaagcctcaggcttggggaggggtcagttcagaaaccttgagggtcttctctgacgcctgcttggctcccttgtgtatgttttggagaatttttttgtagggaggcaagtgagggaggagggcagaacttaaatgctgcaacattcaagggctcaaacggtggttgcctcccactagggagggcagggggccgccagagagagccttgattatgtcctgcaccttaatgggtccttcctaagagagtggctttggtttccatgacaacaagccggcagcatcagagcaagatagtggagtctcctcccccgacccacatctggttctggaatctctacccctctatcccagtcattccaaatcgcaggaatccagctgtggctcagcccaagaccagagggggcagccacgcagtggacagcgctccttctctgtggcctagcaggcaggaggacccctggccctgccccacgctggtaaggaagagatgaatggacagaaatagcgtatgccgggcctggcacagtgggttacgcctgtgatcccgcactttggaaggccgag[132 bp omitted]tgaggcaggagaatcgcttgaacccaggaggcagaggttgcagtgagctgagatcgtgctactgtactcaagcctgggcaataagagcaaaactccgtcttgaaaaaaaaaaaaaaaaagctacagccaggaagggagcagtggctcatgcctgtaatcccagcactttgggaagccaaggagggatgattgcttgaggccaggagttcaagatcagcctgggcgacatggcaagaccatgcctcaccaataagtaaataaataaaaaattagttgggtgtggtggcacgtgcctattgtcccagctacttgggaggctgaggaaggaggactgtttgagcccaggaggaggaggctgcagtgagccatgattgtgccactgcactccagcctgggcgacagaacaagcccctgtctcaaaataacagcaagaaaacaaacaaaacaaaacaagacaaaaaaactctacagctaacagtacacttaatggtacaagactgaatgctttccccctagaatgggactaagacagagacgtccagctctgtagcccaggctggagtgcaggggtgtgatctcagcttactgcaacctccacctcctgggttcaagcaattattgtgccccagcctcccatgtagctggaattacaggtgtgcaccaccacgcctggctaattttttgggggtaattttagtagagacaaggtttcaacatgttggtcaggctggtctcaaactcctggcctcaagtgatctgcccacctcagtttcccgaagtgctaggattacagatgtgagctaccatgcccagccgactctcatcattccttccttccttccttccttccttccttccttctttcctttcttccttccttctttccttctttccctttctttctttctttctctttctcttccttccttctttctctcttccttctttctttctctctttccttccttccttctttctttctttcttttctttctttcttccttccttccttccttcctttcttccttccttcttttttcttttctttttttttgacaaaatctcactctgtcgcccagactggagtgcagtggcaccatctcggctcactgaaacctccgcctcccggattcaagtgattctcatgcctcagcctccctagtagctgggatcacaggtgcccaccaccatgcctggctaatttttgtattttggtagagatggggttttaccatgttggccaagctagtctcaaactcctgacctcaggtgatccacctgcctcggcctcccaaagtgctgggattataggcgtgagcgaccacatccagctgccacttctattcaatattgtattggaggttctagccagtgcataagaaaaaaaaaaaggcatccacattgcaaagaagtaaaactgtgtttattcacgggtgccatggttgtctatgtagaaaatattacagaatctacaaaagattgcaggctccaagaacaatataaaacattaattatatttctatatactagtaacaatctttcagaaattgaaattaggccaggcatggtggctcatgcctgtaatctcagcactttgggaggccaaggcaggcagatcacaaggtcaggagatcaagcccatcctggctaacacggtgaaaccctgtctctactaaaaatacaaaaaattagccaagtgtggtggcgggcgcctgtagtcccagctactcaggaggctgagggaggagaatggcttgaaccggggaagcagaggttgcagtgagctgagatggtgccactgcactccagcctgggtgacaggcaagacttcgtttcaaaaaaaaaaaaagaaaaaagaaagaaaattacagaaaattgtagacataaaagtttctcttttacttgttatgaggaagcagacatcctgggcaacatagtgagaccccgtctctacaaaaaataaacaattagccaggcatggtgatgcacctgtaatcccagctacttaggaggctgaggtagaaggaaagattgcttggccctgggaggtcaaggctgcagtgatctatgattgtaccactgcactccatccagcctgggcaacagagtgagatcttgtctcaaaaataaataaataaataaataaataaataagagagagaaaaagcaggtatgcctgctactccataacatttctgttagaaggctagatgagggttgtctcttaaggtccttaatgaaaaagaaaaaagacaggttcttttttttttttttttg[135 bp omitted]cacgcctggttaattttttgtatttttagtagagatggggtt[133 bp omitted]ctggtctgtaactcctgggctcaagtgatcctcccatcttgtccaccaaaattgctgggatttcaggtgtgagctactgtgacctgcaagggacctcatctttgatggagaatttccctaaaatgctccttttcttaaatagggtctcactctgtagcttgggctggagtcagtggcatgatcatggctcactgcagccttgacttcctgggctcaagagatcctgctgcctcagcctcccaagtagctaactataggcacacaccaccatgccaagctaatttttttattttttgtagaaatgaagtatcactgtgttgcccaggctggtctcaaactcctaggctccagtgatccttctgccttggcctcccaaagtgttgggattacaggcatgagccaccacccccagccaaaatgctgtctgatgagcaagggatgtcaatacaatacggaatgtaccatacctgccaggttgtccatcctctgcatttttggtgctgtctcttccttccac[224 bp omitted]gaggcaagagaatggcgtgaacctgggaggtggagcttgcagttagccaagatcacgccactgcactccagcctgagcgacagagcaagactttgtctcaaaaacaacaacatcaacaaaaaaaaaaaaaatccacaaacatctaactctgttttcttgtgaagatccaattctctccccttgaaagtgggctagacttggcaaatacgatgtggcagaagtgacactatgacttctgaggctgcgtgataagaggtgatacgatacagcttatgcctggttctctctctggatgcttgctcctgggacccagcagccatcttgtgaggaagctcaagctacatggaggtgttcctgccggcagtcccagttgaggtccttcaagatgactccaaccccagcctccttctgacttgaaccacatacgaactgcccccagtgagaactgtctagcagagtccactctcagaaccatgacaagtaataataataggttgttgtttatgtcagtaaccttgaggtcgtttgttaagtcaatttaggtatctagagcaatctggaccatttgtttcttccaaagttctacctaaaaaaaaatccctgtccaggccagacatggtggctcacgcctgtaatgccagcactttaggaggctgaggtgggcggatcataaggtcaggagattgagaccatcctggctaacgcggtgaaaccccatctctactaaaaatacaaaaaattacctgggcgtgatggcgggcgcctgtagtcccagctactcaggaggctgaggcaggagaatggcgtgaacctgggaggcggagattgcagtgagccaagattgagccactgcactccaacctgggtgacagagcaaggctctgtctcaaaaaaaaaaaaaaatccctgtccatacttgaagacctagcctcgcacatgaagtatctcccaggttcctccttccctccccagccagatacaatccattcattctcaggctcctgcatccccaaccacacagtctaacttgagttattctcctcccatcagattctgggctcttgagaacaacatctgcttgtttactgctatataaccaggatccagcacacagcccagcacatagcaggtgctaagaatataaataaatgtggctgaatgtttaaatgaatgaagaaatgaaacaaagatacatactaatgccttcaggctgtgctacattatataaatctatctagtcccttcagggagtgggagacacactgagactgtttcttagaaactaaaccatggcatattttcccaatgaacagacaattccccggagaggaaacagacatcgtaaacaaactcttggggaactgtgtgatttggttagtaattatagacaggcaaattaaagctaccagctagcacgtggcacaatcccagttactattactgcaccac[141 bp omitted]tgaaacaccgtctctacacaaaaatacaaaaattagctggacatggtggcacaggcctgtagtcccaggtacttggaaggctgaggtgggaggattgcttgaacccaggaggcagaggttgcactgagctgagatcatgccactgcactccagcctggacaacagagacagaccctttttttttttttttaatcattttcttatatcttatggattctgtaggtcaggagcttggggcagggctccactgggaaggtagccatttgcccaagccaaggagagaggcctcaagataaatcaatctttcccatatctttcttgtttttaagtcagggtcttgctctgtcacccaggctggagtgcagtggtgcgatcatagctcactgcagcctccatctcctggggtcaagatcctcccacctcagcgtctcaaggagctgggaccacaggtgtacatcactgtacctggctaactttttaaattttttcatagagacggggtctcgctgcattgcccacactagtcttgacctcctggattcaagcaatccctcatgtcagcctctcaagtagctgggactacaggcgtgccctaccatactcagctcattctgcccatatcttgatcttgaacttctaggctccagaaatgtggaaaaataactttctgttgtttaagccactcaacctgtgacatttagctatgacagtccaagcagactaatacacttactcctcttctcgtctctttccttttcttttcttttcttttttgagacggagtctcgctctgtcacccaggctgaagtgcagtggcatgatctcggctcactgcaacctctgcctcccaggttcaagcaattctcctgcctcagcctcctgagtagctggaactacaggcgtgcaccaccacacccagctaatttttgtattttgagtagagacggggtttcactgtgttggccaggatggtcttgatctcttgatcttgtgatctgcccgcctcagcctcccaaagtgctgggattacaggcatgagccaccgagcccagacttgtttgttttttttttttttgagatggagtctcattctgttgcccaggctggagtgcagtggcaagatctcggctcactgcaacctccacctcccaggttcaaatgattctcctgcctcagcctcctgagtacctggaattacaggcatgtgccaccatgcacagcttatttttgtatttttagtagagatggggtttcaccatgttggccaggctggtctcgaactcctgacctcaggtgatctgcccgcctcagcctcccaaagtgctgggattacaggggcgagctaccgcacccagccgagaccagtgttctaagtgaagtaactagtaatgaaaaaccaaatactgtgtattctcacataagtgggagctaagctatgggtttgcaaaggcatacagagtgaaataataggtgggacacagtgactcacacctggaatcccagcactttgggaggagaaggagggaggaccatttgagctcaggagtttgagaccggcctgggcagtatagcaagaccccacaagcatctaaaaaaaattagctgggtgttgtggtacatgcctctagacccagctactcaggaggctcaggcgggagggtcacttgagctcaggagttcaagcctgcagtgagctatgattgcaccactgcactgcagcctggacaacagagcaagaccttatctcaaaaaataaaaatttaaattaaaaaaatggtataatggacagtggagactcagaagcggggagggagtggagagtgagggataaaaagctacatactggggccagacgctgtggttcacacttgtaatcccagcactttgggaggccgaggcaggtggatcacctgaggtcaggagtttgagaccagcctggccaacatggtgaaatcctgtctctactaaaaatacaaaaattagccaggcatggtggcaggcgcctgtaatcccagctacttgggaggctgaggcaggagaatcacttgaccccagcagctgggggttgcagtgagccgagatcttgccacggccctccagcctgggcaacagagcaagactctgtcttaagaaaaaaaaaaaagaaagaaaagaaaagaaaagaaaagaaaaaagcaaaacgagaaaactacgcattgggtacaatgtactctacctgagtgacggctgcgctaaaatcccaggcttcaccactaccaatcatccatgtaaccaaaaacaacttgtaccccaaaagctattgaaattaaaaaaatttttttttgtttttttgttttgagacggagtctcgctccgttgcccaggctggagtgcagtggcacagtctcggctcactgcaagctccgcctcccgggttcatgacattctcctgcctcagcctccggagcagccgggactacaggcgcccgccaccgcg[138 bp omitted]cgcagccttaaatgtttttttaagggtccgttttgttttattttgctccctggtctagctcagctccggaatcggtgcagacacgcaatatcctctcagtagatatttatggaataaataaatctgtctcatctttggcattgctatgatggggtctattttgtctttttctctatttatccccatgtttaaaatatttttttattagaaaaaaaaacggaagtcaccttaggatgaaagcgcctcccctcccaaccccccagtggggtttggcatgtctctcgctgtccccatcacctccctggcccgtgcaggtggcctggccgtggttctgcacgggccgccgcgtttaggcggcactgcagctaatgacaccccgcagcgtgtgcctggctggccgcccgagatgtgcctgcgcatggcatggggacgtttgcaagcctggatcctggcgcgggggcaggtagcgggagaacaggcacgcagatggcagaggggctggggcggggacgctcgcctggcgtgggccacagtcacgacccaatcgtagcccccactgtgtctcttcatagttgcatccttggaaaccggcggggctgcaggaaaaaaattaaaaatcagatgaaagaaaataaagcagtggagacctccagaaggtgcccgccccacagaatagtagtcagagtggtgctgtggttacaatgtgcttcctggggtgatgactttattcattccacagatatttattattattattattattattattattattgttattatttgaaatggagttttgctcctgttgcccagactggagtgcaatggcgcgatctcggcccaccacaacctctccctcccgggttcaagcgattcttgtgcctcagcctcccgagtagctgggattacaggcatgcgctgtcacgcctggttaatttttgtatttttagtagagacgaggtttctccatgttggtcaggctggtctcgaactcctgacctcaggtgatccgcccatttcagcctcccaaattgctgggattacagacgtgagccaccgcgcccagcttccacggatatttattgagcacctactctgttctagaaacaggaatgcagcagtgaacacgacagagaagagtccctgaacaaacattctaaatttgttaattatacagcagggtaggttggaaagtgatgtatgctacggggggaaaaataggctgaaaggatcgtcgttccacctcggcctcccaaaatagtgggattataggtgtgagccacagtgctcagtcttaattttcaatattggccatgattaacaactggtaggaaaaaaaaatcctgaaaatataacgatcagctcttgtgagtcagtatacaccaacatctgcacactctggaggggtaaattctgttttgtttgtttgttttgttttgttttgttttgttgagacggagtctctctgtcgcccaggctggagttcagtggcatgatcttggctcactgcaacttcccagggagttggaaggagggaggaggttggagggaggaggttagagggaggaggttggagggagagaggaggttggagggaggaggttggagggaggaggttggagggagggagtaggttggagggagggaggaggttggagggagggaggaggttggagggaggaggttggagggaggaggttggagggagggaggaggttggagggagggacgaggttggagggagggaggaggttggagggaggaggttggagggagggaggagattggaggcaggaggttggagggaggagcttggagggagggaggaggttggagggaggaggttggaggcaggaggtttgctgatttttagcatttgcccatttcctgtggtgtaaatattcaagccaagaatgatttccagctaccaccaaggagccatagaacagggtatgggggctgggcgcggtggctcacacctgtaatcccagcacttcgggaggctgaggcgggtggatcacaaggtcaagagataaagaccatcctggccaacatgatgaaatcccacgtctactaaaaatacaaaaattaactgggcgtggtggtgtgcgcctgtagtcccagttacttgagaggctgaggcaggagaatcatttgaacccgggaggcggaggttgcagtgagccgagatcacatccccgcactccagcctggtaacacagcaagaccccgtctcaaagaacaaacaaataaaaaagaacaggatagtcggaaggaacgtgcagggggaccccagcacacagtatcccggtaccactgggcaggtgcagtggacttgaataacccaggaaacatagaacatagtgggacatagtaacaaaaatagtgaatttgtgagcatttgttatttgttatctttgtttttgttgt[139 bp omitted]cctcagcctcccgagtagctgggaatgcaggcgcccgccaccatgcccagctaatttttctatttttagtagagacgaggtttcaccatgttggcaaggtgggtcttgaactcctgacctcaggttatctgcctgcctcgggctcccaaagtgctgggattgcaggattgagccaccacacttggcctaaaaaacactttttttattttttatttttatttattattattatttttgagacagagtctcgctctgtcacccaggctggtgtgcagtggcacgatctcagctcaccgcaacctctgtctcccaggttcaagcaattctcctgcctcagcctcctgagtagttgggattacaggcgcctaccaccacgcctggctaatttttatagttttagtagagactgcatttcaccgtgttggccaggctggcctcaaactcctgacctcaggggatcctcctgcctcagcctcccaaagtgctgggattacagacgtgagccatcgcacctggccacaaagcacttttagacatgttttctctctcacgctcctatgttctcattttacagatgagaaagctatgttcagggagcttgggccactgtccaaagccatgcagctgtttggccgtggacttggttgttgaatccaggaattcagcttttagaattaacctcttgtctgtgttgagaggcaaatggttcgtaaagtattttcactcaaaacgcttagcctccctacggtgccaaatactataacaggcaaaaagagtgtcccgggggttgaccaaggtccatctggctggagcttctcatgcccctaaatggtcttatggccagtcccaggtgcactgtggaagtctcaaaagtagacatttaacatgcaactttaagctgctgtcctgttattggaccacagtccctctaattttttaaaataaatcctgtaattgcttcgtggaaagaacaattatattgcaag[142 bp omitted]tgaaaccccatttctactaaaaacacaaaaattagctgggtgtagtggcgcgcgcttgtagtcccagctacctgggaagctgaggcaggagaatcacttgaacctgggacgtggaggttgcagcgagacaagatcacaccactgaactccggcccaggcgacaagagtgaaactccatctcccccccgccaaaaaaaaaaaaaaaaaacttcagggtatgtgtgtgtatatttcaaatggttgaactgttcattaaaaacatttcaaatatgccatgaaatcctatttggaggcatttcttcatgttgtaccacacatgagaaagcatcaaaaaacaattggtggccaggtgaggtggctcacgcctgtcatcccagcactttgggaggccgaggcgggcggatcatgaggtcaggagttcgagaccagcctgaccaacatggagaaaccccgtctctactaaaaatacaacattagcctggcatggtagcacatgcctgtaatcccagctacttgggaggctgaggcaggagaattgcttgaacccgggaggtggaggttgtggtgagccaagatcgtaccattgcattccagcctggacaatgagagtgaaactccgtctcaaaaaaaaaaaaaaagaaaagaaaaaaagaaaaagaaaacaacaacaacaaaaaaagaatacttacactcgtaggcattacccaagagaaatgaaaacatatttccacacaaagacctgtacgcagaagtttatagcagctttatttgtaatcatctaaaactggaaagaaccatcacgtaatggataaaagaatggtggctcgttcttgccatggaatacagctccgtaataaaaggcaacgaactgctaatacacgtaacagcatagatgcatcttgaatgcattgtgctgaatgaaagctgcagaccccagaggccgcatactgcatttttccgtttctgtgctgttagtatgaaacgcagagaacagatcagcagttaccagtggctgcgggtggac[360 bp omitted]gaacatcttggttgtgatactggctacatagctgcatgtttgtcacacctgttctctttatttatttttatttatttatcttagagacagggtctccctctgtcacccaggctgaagtacaatggtgcaatcacggctcactgcagccttgacctcctaggttcaagcgatcctcccacttcagcctcccgagtagctgagacaacaggtgcacgctaccacgcccggctaatttttctatttttgtagagatgtgctatgtttcccaggctggtctcgaattcctgggttcaagcaatcctcccacctcagcctcccaaagtgctgagattacaggtgtgagtcaccttgcccggccaaacctgtcctctttattaaaaatgcattttattgtatatatattacacctcgaataaactttaaaaataaagaattcgggtcaccaaagatttctttttcataatataattcattgttgtcaaaaaatgccagggaatggatcaccttacaactgctagaatagctatcatcaaaaagacgaaaggtaacaaacgttggcaaggatttgaagagaacacttatacactactgatggtaattttaattagtatagccattatagaaaatggtatggaagttccaaagaaaaatttaaaaataaaactaccaggtgatccaggaatcccacttctgggtctttatccaaaggaattgaagtcagcacgtcaggccgggcatagtggctcacgcctgtaattctagcactttgggaggctgaggcgggcggatctcccaaggtcaggagttcgagaccatcctggccaacatggcgaaacccgtctctaccaaaaatacaaaaattagccgggcgtggtggtggatgtctgtagtcccagctactcgggaggctgaggcacgagaatcacttgaacccgggaggcagaggttgcagtgagccgagattgcggcattgccctccagcctaggcaacaagagcgagacgctgtctcaaaaacaaaaaccaaaaccaaaaaaccccacaaagttattgaaagaaataaataaaaataaatacgtaaataaaagaaggaaattctgacacatactagaatatacataaatgtatgtaaatgaataaatgaatatatgaatgtgagaataagaagtgagcgcgtcattttttaccgttctcccagctcaaaacgttttcgccccgtccagcttttcggcctcctccgggcgccccctgccggtgggccgcttgcccgtgctccaagcccaaaacagacgcgtcccctctagtcgcttttagccttcggtctcggtcctgattggctcagagtcgctcgtgatcccttttgggaaatgtagtccttaagggtatcgcgcctgctttttctatacgctctgacgcagagatagccacgggaagtacgtcaccaaatttcgccggttcccacaagctaggtcgtgtgacgctgcatgacgggaattgtagtcctcaaattgctagcttccgatgccatgcgctgcgactggaacgccaattcccaccatgccgcgcgctcacagctctcaggggctgtcctgtggcctttggggaagtgtagtcttgagcccccaagattccttttctgttctatggagtgggcccgcgcaaaggactccatttcccggcgtgctgccatccgtcgggtcgcggcagccattttgttccgcccgaggagaccctaagatggcggcgagggggacggtgaaggttgcctcccgcccgtccgggctctgatcctccgtctccccgtcccccggcggccggcccatggcctggcggaggcccgaaccatggacctccgcaccgccgtgtacaacgccgcccgtgatggcaagctgcagctgctccagaagctgctcagcggccggagccgggaggaactggacgagctgacgggcgaggtggccggcgggggaacgccgctactcatcgccgcccgctacggccacctggacgtggtggagtacctggtggaccggtgcggcgcgagcgtggaggccggtggctcggtgcacttcgatggcgagaccatcgagggcgcgccgccgctgtgggccgcctccgcagccggccacctggacgtggtgcggagcctgctgcgccgcggggcctcggtgaaccgcaccacgcgcaccaactccacgcctctccgcgccgcctgcttcgacggccacctggaggtggtgcgctacctggtcggcgagcaccaggccgacctggaggtggccaaccggcacggccacacgtgcctcatgatctcgtgctacaagggccaccgtgagatcgcccgctacctgctggagcagggcgcccaggtgaaccggcgcagcgccaagggcaacacggccctgcatgactgcgccgagtccggcagcctggagatcctgcagctgctgctggggtgcaaggcccgcatggaacgtgacggctacggcatgaccccgctgctcgcggccagcgtgacgggccacaccaacatcgtggagtacctcatccaggagcagcccggccaggagcaggtcgcagggggagaggctcagcctgggctgccccaagaagacccctccaccagccaggggtgtgcgcagcctcagggggctccgtgctgcagctcctccccagaggaaccactgaacggggaatcttacgaaagctgctgtcccaccagccgggaagctgccgtggaagccttggaattgctgggagctacgtatgtggataagaaacgagatctgcttggggcccttaaacactggaggcgggccatggagctgcgtcaccaggggggcgagtacctgcccaaaccggagcccccacagctggtcctggcctatgactattccagggaggtcaacaccaccgaggagctggaggcgctgatcaccgacccggatgagatgcgcatgcaggccctgttgatccgggagcgcatcctcggtccctcgcacccggacacttcctattacatccgttacaggggtgccgtgtacgccgactcgggcaatttcgagcgctgcatccgcttgtggaagtacgccctggacatgcaacagagcaacctggagcctctgagccccatgaccgccagcagcttcctctccttcgcggaactcttctcctacgtgcttcaggaccgggccgccaaaggcagcctgggcacccagatcggctttgcagacctcatgggggttctcaccaaaggggtccgggaagtggaacgggccctgcagctgcccagggagcccggagactcagcccagttcaccaaggcgctggccatcatcctccacctgctctacctgctggagaaagtggagtgcacccccagccaggagcacctgaagcaccagaccgtctaccgcctgctcaagtgcgcgcccaggggcaagaacggcttcacccctctgcacatggctgtggacaaggacaccacaaacgtgggccgctatcccgtgggcagattcccctccctgcacgtggtcaaagtgctgctcgactgcggggccgacccggacagcagggattttgacaacaacaccccgctacacatagcagcccagaacaactgcccggccatcatgaatgccctgatcgaagcaggggcccacatggacgccaccaatgccttcaagaagacggcctacgagctgctggacgagaagctgctggccaggggtaccatgcagcccttcaactacgtgaccctgcagtgccttgcggcccgggccctggataagaacaagatcccttacaagggcttcatcccggaagatctggaggcgttcatcgaactgcactgacctgcccagaacgcctgcaccctcacctctcccctctcctgctgagatgggggaaatccggctgcggcatagcagatgctcgttcttgcctccttcaggcaccaatcaggagaagggttctgcctcccatcccctctacctgcagacagggtcggaggtgttagcgagcctttggtgctagaagcctgcggggtcatgtgctaagaggacagtctttctccgggagcccgctcactcattctgagttaggaaaagacacaagaccttccccacatcctgtctgcctgggttagggaggcctttgccttgttacctagaggcggagggactgaagccattgcgttccttccctgctagaaacacaggaagaagttgaggactgtctgccttccctcgtccctttacctggccagataactccagccgctgaatacagtgttaggactgggggctcctgagatgagagtttgagattcagggaatgagaccacctctcatttcttccagcatgatcgcgccctgctcccgtgccaccgtagtccctggcagacaggcagggctctgcccagggcagcctgccacttgcatagctttcggttggtttggtgttctgtttatttaataagtgggcaggttgcaagcgttgcacagaaattctgagattttactgcctttttttttttttttaagaaagttgtttgttggactccataagtgaatttcaagcagtgaggattttgtggtgcctgagatggccgagggcacagggagtgagctgtatgtgtgaggaatttggtgagcgagataaaagtccacggtgtcaacccctaaaacatgggtgaccgtacatttttatacatctccactctacggccttttacaggctttccgattttacaggcctttccaagtttccattctccttagagagagaactgtgcttccaaacagaaatcaggagtgaccacaaagcctgaaaacactttgccacccagcaaagaactggcacaattggtttgggtctgcattgccatagtgcccgagttaaaactgcaggccactctgccttgcagtggcctctgatttcattgtgggtgcatccacaggtggcccgagctgttctttcagctgctccaaggattgagacccaagtcatcatgaaaaaggcccaagtacagtcttaatgcgataaatccactagctaagacgtcgagtgccaagaccagccttccagccgaggtttggacaaagtctcaggttcccgtgactcagggtaaggtgctggggctgccagaggacctgccccagcaagatttttgtcaagagcgagactccatcagcccaggcagacgggagcaggttcttggccagcgtagacagcagcaaacagcagcagggaagccattctcactgcatcctccctgcagtagccacggccaggcccttaggaggagcagtgaccgggggtgtccagaaatatcctgtccctggatggaaactaggtctcgtttggatttttttttttttttgccgtgttaggaaattatttattaatttacaagacaggttttaactcagccgaggtgggaaatggtgtccctgtccctcccaaagcacagagcacagaaatgaggccgtttacatggcgagtctccgtgctggtgtttaagtcattaaaaagatactcaaagagaatggcctgcctgatgcgtccttggcgtgggttaactggggaagtcggaggtgggtgagtcagtccatggcattggtgtgagtgaacagagagccctagggccacctcccctagccagaggggtttctgtgttacatactggggctttttttttttttttgagacagagtctcaccctgtcccccaggctggagtgcaatggcgcgatctcagctcactgcaacctctgcctcctgggttcaaacaattctgcttcagcctcctgagtagctgagattacaggcacctgccactatgcccagctaatttttgtattttctgtagaggcaggttttgccatgttggccaggctggtctcaaactcctgaactcaagcgatcctcccacctcagcctcccaaagtgctggaattacaagcatgaaccactgcacctggcctctatgttacatactggggctttgtgtaaaatttcatttgaaaaacagtatgttgctctttgaaaaaaagcctgggcaacatagtgagagcctgtctttacaaaaataaaaaataggctgggtacggtggctcacatctgtaatctcagcaccttgggaagcctgggcaacatagtaagacctctgtctctacattttttttttttttttttttgagatggagtcttgctctgtcacccaggctggagtgcagtgacgccatctcggctcactgcaaccgctgcctcccgggttcaagtgattctcctgcctcagcctcctgagcatctgggactacaggcatacaccaccatgcctggctaattgtgtatttttagcagagacggggtttcaccatattggccatgctggtctcaaactcctgaccttgtgatccactcgcctcggcctcctaaagtgctgggattataggtgtgagccaccacgcctggcccttttttgttttcctttatctgccatctcatctcacctccttgtgtaaacttgttccattctaaaattctggttttctccatatcagaacagtcaaacccccaccagaaagcaccaccccgttagctgggtccatgggattttgctgagcccctgccatgtgccaggcaggtttcaggcccccttggggataaggattgagctgtcgatatgaacgtccggttaatccctgtgcgcccgcctcacgtggcagtggggagaggccctgctgtggggcaccgcatgctgcttccatggtgcattgggttggagggctcttctcccgagggtgggtgtctcccatctcttgccttcacacacctgctgtcttgtttcatttgggactggacagtcccacaggtgacagctgttgggctgttgtatgcctgtttggtgttgcatcaaaggagtgggtttgaatcagcaggtgctctcaaagctgtctcctgggagacacagtactagtgagcatttattgagcacctactgtatgccaggcaccattttctgtggttaaatgcactgcctgtttacacaacagccctctaaaggaggaaaaacatatcagagtcccatggatggaagaaaaataatgaagtaggaaaaacggccctcttaagatgaaggtcatctttttttttttttttttttttttttgagacggagtctctgtcgctcaggctggagtgcagtggtgtgatctcggctcactgcaagctcagcctcccgggttcacaccattctcctgcctcagcctcccgagtagctgggactacaggcacctgccaccatgcccggctaattttttgtatttttagtagagatggg[132 bp omitted]ttcaggtgagggctgatccagcagatcccaattattcctaaagacctggttgatagctcccttgagactggggtggggtgggtgtcccaagatgaccgccagcagaaaagagagcatctttctcccagtcaaaagccaaagtaggacctatctaaagtaagtcctggccgggcacggtggctcacacctgtaatcccagcaccttgggaggctgaggctggaggatcgcttgagcctgggagtttgagaccatcatgggcagcaaagtgagatcctgtctctacaaaaaaaaaaaaaaaaaaaaattagccatgtgtagtgatatgtagtcccagctgctactggggaggctgaagcaggaggattgattgagcccaggagtttgaggctgcagtgagccttaatggcaccatcacactccagcctgggcaacagagtgagaccctgtttcaaaaaaacaaagcagggccggg[174 bp omitted]gaggcag[136 bp omitted]ggcaggcgggggaactgaggctactaagagacattaagatgcttaaggacagccgggcgcggtggcagacgcctgtaatcccagcactttgggaggctgaggcgggcggatcacgaggtcaggagaccaagaccatcctggctaacacggtgaaaccccgtctctctactaaaagcacaaaaaattagccaggcatggtggtgggcgcttgtagtcccagctactcgggaggctgaggcaggagaatggtgtgaactcaggaggcggagcttgcagtgagccgagatcgcaccactgcactccagcctgggcgacagagcacaagactccatctcaaaaaaaaaaaaaagaaagaaaaatgcctaaggacacagcgcatgaaggaagggtcgagattggaacccaggaccgtcagagttcataccttgtgctgattctccatccgggacgccagacacatggatccctttcccctgctttctggtgttgttttggcacaagctctcccatccctggggcaggtggccatcctgcctccgcatcctgagcgtctgtttccctcggggatctgccagactcagccccctaaccccaagaaaatcactcacaaaaatcatctgagctaaatgcttgctttgaaagctcagacctggggattgtaactttagcctcataccttctaatgaaggccatcttaaagctctaccagtttcagctgagggccgatccagcagatcccagttgttcctaaagacctggttgctagctcctctgagactggggtggggtgggtgtcccaaggtgatgaccaggagaaaagagagcgtcttcctcccagtcacatcccaagattcgtgaccgagcgcggtggctcacgcctgtaattccagcactttgggagaccgaggcaggtggatcacgaggtcaggagttcgagaccagcctggtcaacatggtgaaaccctatctattctaaaaatacaaaaaattagccaggcacggtggcaggcacctgtaatcccagctacttgggaggctgaggaaggagaatcgcttgaacccgggagatggaggttgcagtgagccgagattgcaccactgcactccagcctgggcaacagagcaagactctgtctcaaaacaaaacaaaacaaacaaacaaacaaacaaacaaaaaactaaaaacatcaagatacgctctgattggaccagcctgggtcccatgttcttccatgacccaatcctagtagcccaggagtgggatgtgccaattggcttggcctgaggagggcccccagagggtctgtaatccatgtgtaactggagttgctgtaaaatggggccatctggctgggtgcggtggctcacgcctgtaatcccaacactttgggaggcc[134 bp omitted]gaggcaggagagtggcgtgaacccgggaggcggagt[137 bp omitted]taaaatgactacctgccgttgatcagtgaagaaaaaagctcagagagctcaagtggagtacctaaggccacacagccaagagggagagccaagtcgtttgtggttaaatgtcctgcctgtttacacagcagccctctaaaggcggaaaaacatgtcagagtcccatggacgggagaaaaataagaataataataaagtaggaaaaacagccctcttaagaggaaggccatcttaaagctctaccagcttcaggtgagggctgatccagcagatcccagagaaacaggctcacagagaggggagggggcttgtctaagcttacccagcccggaagcatcggggtcaaagcttaaccccctgctggaaggtgtcgagagccaggcagccaagcctgacctgggagatggggaagtgggggcccccccaagctcgccgactgcccttcccagcctgctgccagtctgattccacagaactgaagtcgggacctggagttctgctcattcgctcatctactcagtgactttcttagaccctccccagcactttgagggtgtcagtcactgctgcgtcctcagcacccacgccagggtctgtcccacgccaggtggcctgtaaatatgggctgagcaagcgaacagtgaacgagttgggaattcacatcctcctctgactacttggggcagcagcaggggacacaagcaggcccctatggctttgccagaccccgggtgccgccgcccccatggaattgcaggactgttatctgagcaacgtcgacgggggagaacacccctgcccgaggttaaagatagcaccgctcgaatcacatcacaggccgaaaaggccagatgacccaccagggacattgaatccgtgtcccgagaggggtggggcgggggtgtggattcctgcggggagcttcgggactggaaaaaacagagggtgctctgaccgagtgtttaccaaaacatgtattaggcaagacccgggccgaatgtgggtggcaccgcccctgtgctgggccaggagaatgtgcccgcaccggtcccagatcctgtttccccagtgggttgtacaagacaccttgaacttctgcatgaactgggacattcagaattccctggagcaaccccctccctccaccctgtgccttgatatctcctattaaagcttgtgtttgaatgtctgttaatagacatgatttaattattgatattaattcaaatgtattaatttgaattattaacttattaatcatttgatgtcgattaaagcaatgatcttgatccaatgtcatctcctccatgaagtcttcctggattatctaaggtgcagccccacagccagggacagtggttcatgcctataatcccagcattttgggaggctgaggtgggagggttggttgagcccaggagttcgagaccagcctggacaacttagtgagacccactcccctcatctctacaagaaatatataaaaattagctgggtgtggtggtgtgcacctgtgatcccagctgctcaagagactgaggtgggaggattgcttgagcccaggaggtggaggctgtagtgagctgtgattgcaccattgcacttcagcctgggtgacagagagagaccgtctctaaacaaacaaacaaacaaataaataaatacgagttgaatggcatttacatttttttttttttttgagacggagtctcactgtcgcccaggctggagtgcagtggtgcgatctccgctcactgcaagctccgcctcccaggttcacgccattctcctgcctc[220 bp omitted]agatataatttgcaaaacataaaattcaccattttaacatggataattcaggggcttttagtacatttacaaggctgtacaaccatcaccaagatctaattcccaaaaaataaaggttgattttcaaagcctatttaaagaaaaatattaactggctcaagcaatagaaaatatattaaagagccagccacaatggcatgtgcctataatcccagccacttaggaaggtgagatgagatcatcactgaaggcccagagttcaagactagccaacatagcaagacccc[146 bp omitted]aaccccgtctctactaaaaatacaaaattagctgggtgtggtggtgcatgcctgtcatcccagctactcgggaggctgaggcacgagaatcgcttgaacccaggaagcagtggttgcagtgagccaagatcgtgccattgcactccagcctgggcgacagagtaacactttgtctcaaaataaataaataaataataaaaaataaaaatagagacaggggtctcactgtgttggccaggctggtcccaaactcctgggcttaagcgatccacctcagcctcccgaaatatggggattacaggaaagagccactgcgcccagacactccttttcctgggaagataaaaagttttgcagcttcccttggaaactggaaaccgtggcagcctcccagggctataataaggccacagccagtgaacaggttaaaaataaaagatccccgcccaggggcacttggggatggcatttgtgagcccaggcaaaccccagggctgcagcgagacactcttgggggaggggactggagaagagcctgctgtgtggcctcaggctggcatctgccccctctgggctccaattgggctggaaacaacattagacagtgatttccaaagatcccacacctgcgcacccctgacgattaactctggctttaatttgtctctgaggggcctttctggctcatcctagtcccggccttgcagtctcattgtgtgactttgcaaagcgacactacctctctgtgcctcagtttctccatctgcacaatggggcaaagaaagccctggtgacctgccgatggggataggtatttggctgtcattattgttgcaatgtattatttatctatttatttatttttatttttatttttattttttgagacggagtctcgctctgttgcccaggctggagtgcagtggcgcgatctcagctcactgcaacctctgcctcctgggttcaagtcattctcctgcctcagcctcccgagtaactgggactacaggcacccgccaccacacctggctgattttttgtgtttttagtagagacgggttttcaccgtgttagtcagggtggtctggatctcctgacctcatgatccgcccgcctcggcctcccaaagtgctggaattacaggcgtgagccaccatgtccggcctatttatttatttttgaggtggagtcttgctctgtcacccaggctggagtgcagtggtgacatctcggctcactgcaatctccacctcccgggttcaagtgattctcctgcctcagcctcccgaatagctgggactacaggtgcctgccaccacgcctggctaatttttgtatttttagttgagatggggtttcaccatgttggccaggct[131 bp omitted]ggggactgggcacttttcagggagccccctttgggctctctctttggagcaggcccgggaaagagggaccgtcccctcctcagccggggtcgggagaggctggaaccgctgtccgatggtgccctctggtgacactgttggctcattgcggcaccttctgggtccccacagatagttcatgcgccccctgcctccaggcttgggggacacaaggcctgcaccacggtgggccacactggctcccctcggtccctcggagggtccacgctccctcctacccctcagggttgttacctgtgccatgccctccacctggagtgccctttccttcctgggggctgcagagagctctgagcactactggtgggttcaggtccctgtccccgggtccccaccccctattacttctgcatccccatcacacccagggcaagcccacacgagaccacccattcctgtgtctgcctccccttggagctgtgagccctatgagggcagcaacgggatccgtcccagaaaacagcgttcactcgatctgaagccatcccaggcatacagtagatgctcaatacacactgctcaacgagggaatgaacggataatggggggaatgaacaaaatacaccggctagcaggaagcgaacgtggaatcgagaaacggaaaaactgacttgaggccaggcgcagaggctcatgcctgcagtcccaacactggaaggccaaggcgggaggattgcttgagcccaggagttcgagaccagcctgggcaacatggtgaaactccatctctacaaaaaatgtagggccgggcacagtggctcacgcctgtattcccagcactttgggaagatgaggcaggtgaatcatttgaggtcaggagttcgagaccagcctagccaacatggtgaaataccgtctctactgaaaatacaaaaaaattagctgcgtgtggtggcacatgcctgtaatcccagttactcaggaggctgagatgggaggattgcttgagcctgggaggtccaggccgcagtgagctgtgatcgcaccactgcacttcagcctgagcaacagtgagaccctgtctcaaaaaaaaaaaaaaagcagctgggcatggtggtgcatgtttgtaatcccagcactttgcgagcctgaggctgagctggacagattacttgaacccaggagtttgaaaccagcctgggcaacacagcaaaaccccatctttacaaaaattacctgggtgtgatggtgtgcacctgtggtcccagctacgcaggaggctgaggtgggaggattgcttggcctggaagtgttgaggctgcagtgagctgtgatcagaccactgcattccagcctgggtgacagagtgggaccttgtttcaaaaataaataaataaataaattaattaattaattaattaatttttaaaaagacttgggcatccaccgggtgtggtggctcacacctgtcatcccagcactttgggaggccgaggcgggtagatcatttgaggtcaggagctcgagaccagcctgaccaacacagtgaaacactgtctctactaaaaatacaaaattagctgggcatggtggcgtgtgcctgtaatcccagctacttgggaggctgaggcaggagaatcacttgaacccgggaggcagaggttgcagtgagccgagatagcaccactacactccagcctgggcaacaagagtgaaactccatctcaaaaaaaaaaaaaaaaaaaaaagacttggggatcaattcaaattcaaacatttattgagcatctgctatagaccataccttgggatcccacaataaagcccacggacaggcagaccatagacatgtgggccatgaataagttgattgtatttgtctcaaactccaaagtgctgtggaaagatgaagcctattcaggggatctggtgggttctgttttgaatgaattatattatattatattatattatattatattatattatattaatttttatttttttgagacagggtcttgctctgtcacccaggctggaatgcggtggtatgatctcggctcactgcaacctctgcctcccaggttcaagcaatcctcctgcctcagcctcctgagtagctgggattacaggcgtgagccacagtgcccggccaattttatttaattttttaattttttttttttacaggtaccaccaggcccagctaattttttgtatttttgttagagatggagtttcaccatgttggccaggttggtcttgaactcctgacctcaaggcatccccctgcctcggtttcccaaagtgctgggatgacagacgtgagccaccatgtccagccttgaatgaattttaaatgaggagcacgc[132 bp omitted]tcccacctcagcctctggagcagctgggacaacaggtgcccaccaccagctcagccagacggtgatgtttgagcaaagatctgaagcaagtgatgagggagccatgtaggtacctgggggaagggcattccaggctgaagtcacagcctgtgcaaaggccctgaggcaggaccgcacccaacatgttataggaacaacgggaaggctcacatggctggagcagagtgacaaaggccagaggtcaaggcagatgtaaaactgaccctggatttaacaacacaagatcaccaaggaccttgagcagagcagtttctttttattctttttattttatattttattgtatttttttgagacagaatctcgctctgtcgcccaggctgcagtgtaatggtgagatctcggctcactccaacctctgcctcccaggttcaagcgattcttctgcctcagcctccttagtagctgggattacaggagtgagccacagtgcccggccaattttattttattatttatttatttatttatttattttcagacagagtcttgttctgccgcccaggctggagtgcagtggtgagatctcggctcactgcaacctctgcctcccgggttcaagcgattctcctgcctcagcctctcaagtagctgggattacaggcgtgtgccaccacgctcagctatttgttgtaatttttgtggagacggggtttcaccatgttggccaggctggtttcgaactcctgggctcaagtcatccaccagcctcagcctcccaaagtgctgggattacagacgtcagccaccgcgcctggctgagcagagcaatttctgggacatgcggctggggtgggtggtggatggtaatagtttcacaggaaggacaggacaggaagaggatcctgggggaacttctggaaattctgttctggtgcaaagcctgtaggaagtgaagctgcaccctggcccctgccttccagaagggccctttattttcatggccagaggggccaagcgggtcctggctgtgcagcctcagaaacttcctctttcagttcctggagggagcccgcagggtctgggtcatgcagtctctagcttgagcagcagggtgacccctggcaaaggctcagcatcatgccaagcccaggagggcaacagatgcttctagaagaaactaagggccgggtgcagtggctcacgcctgtaatcccagtactttgggaggccaaggcagtaggatcgcttgaacccaggagtttgagatcagcctgggtaacatagtgagattcttgtctttacaaaaaaatacaaaagttagccgggtgtggtggtgcctgcctgtagtccccgctacctgggaagctgaggcgggaggatcgcttgagcccaggagttcaaggctacagtgaaccatgatcttgccactgcactgcaggctgggtaacagaatgagaccctgtctcaaaaaataggatgggcatcagaaaacatattcatgttttgctcagtgagagaaggcagacacaaaaggccacacagtgtgtgatccaatttctttctttttttttttttctgagatggagtctcgctctgttgcccaggctggagtgcagtggcgtgatctcggctcactgcaagctctgcctcccaggttcacgccattctcctgcctcagcctcccgagtagctgggattacaggcgcccgccaccacgcccggctaatttttttatatttttagtagagacggggtttcaccgtgttagccaggatggtctcgatttcctgaccttgtgatccacctgccttggcctccgaaagtgctgggattacaggtgtgagacaccgcgcccggccacgtgatccaatttctgtgaaatgttcaggacaggctcatccacagaaacaggaaggggatgcatgggtgccggggctggggggaggcagtgggcagtgtcagctgatggttccagtgctgctttttggggtgatgaaagtttctgaaattagatagtggcaatagttgcataatatagtgaatacagtaaaaaccactgatgtctccacttaagaaataacaggaccaggcgcagtggctcacgcctgtaatcccaacactttgggaggccgaggtgggcagatcacctgaggtcaggagttcgagaccaacctagccaacatggtaaaacccccgtctcctactaaaaatataaaaaatagctgggtgtggtggcgggcccctgtaatcccagctacttggaaggctgaggcacaagaatcgcttgaaccaggaggtggagatcacgccactgcactccagcctgggtgccggggcgagacgccatctcaaa[133 bp omitted]taaaccccgtctccactaaaaatacaaaattagctgggcatggtgacgcatgcttgtaatcccagctactcaggagttcaagaccagcttggacaacatatgtgaaaccccatctctactaaaaatacaaaaattagctggccgtggtggcgcatgcctgtaatcccagctactcggaaagctgaggcaggtgaattgcttaaacctgtgaggcgaaggctgcaatgagctgagatcaggccactgcactccagcctgggcgacagagtaagagttggtctcaaaaaaatatgtatcagaaagagatcattccaagcaggcacatatagctgcccagcccggtctggctgtgtgtatactgacttccagaaagaaatcctctgtt[139 bp omitted]atggagaaacctcgtctctactaaaaacacaacattagctgggcatggtggtgcatgcctgtaatcccagctacttgagagactgaggcaggagaatcgcttgaaaccgggaggtggaagttgcagtgagccaagatcgcgccactgcactccagcctgggcaacaagagcaaaaactccatctcaaaataaataaagaaataaatgggacattttcttatttttttttcttcctatttttcttcaaggctgttaggctcccagggaatctgggctttcgtggccacgtggggccggcgggcggtggccaccagagggcgctggggcagcgcaaatcgcagctgagcccctagagctggggacctggtcctgcctggagctgccttccagaccttccagaccttcacccatgctgtaccaccttctagaactctctccccgcccgtggctcattccaatgaaggcctgaggtcttagcttacttccttctttcagaaacttcctttaatctccccaggccagtctagggtcccctttggggtcccacagcttccccatcagagcccccatcaccccataactgcctaatactgtctgtctccagcactggacaacatagatttcttttcttttcttttcttttctttttaatggagtttcgctctgtcatccaggctggagtgcagtggtgcgatctcagctcactgcaagctccgcctcccaggttcacgccattctcctgcctcagcctcctgagtagctgggactacaggcgcccgccaccacgcctggctaatttttttgtatttttggtagagacggggtttcaccatgttggtcaggatggtcttgatctcctgacctcgtgatccgcctgcctgggcctcccaaagtgctgggattacaggtgtgagccactgcgcccggcctctttctttcttttttttgagacagagtctcactccgtagcccaggctggagtgcggtggcgtgatctcggctcactgcaacctccacctcccaggttcaagcaattctcctgcctcaggctcctgagtagctgggattaaaggcacgcatcaccacgctcggctaatttttgtatttttagtacagacagggtttcaccatg[136 bp omitted]caggctggagtgcagtgacaccatgatatctcactgcagccttgacttcctgggctcaagggatcctcctgcttcagcctcccagtagctgggacagcaggtgggtgccaccaagcctggctttttatttcattatttcatttcatttcattgagacaggattctcactgtgttgaccaggctgatctcaaagtcctggcttcatgtgatcctcccacttcggcctcccaaactgctgggattacagacgtcagccaccgtgcccgaccctcagggcattcaaaatgaccctgctttacagatctacaggaggtatgtggagacagctgggaatgggagttccagacgtgaggtc[142 bp omitted]gaggaaaccctgtctctactaaaaaaaaaaaaaaaaaaaaaaaaaaaaatttagctggatgtggtggtgggtgcctgtcatcccagctactcaggaggctgaggcaggagaattgcttgaacccaggaggcggaggttgcagtgagccgagattccaccattgcactccagcctgggcaagaagagtgaaactctgtcacaaaatagaagaagaagaaagaagaagaaagaagaagaagaggaagaggaagaggaggaggaagaggaagaagaagaggaagaggaggaggaggaagaagaagaagaagaggaagaggaaggctgtgtcttgccccaagtgccacactatctcagggagaagcaggggcttgaacccgctgttcctgctgccgaggccagcctggctgacctgggacaagtgaaggttcctgggccgaattctttttcagtcactttaaggaacaggaaagggtcctctgaactgggcaggccctgaatgtgcccacatctcctctgctcttgtctctacctggtccagccccagccaacatcactcacccagaccagtgcagtcgcctccaccctggtgccccagcatcagccctggcccaccaaggtctgtcctccctgcagcggccaccagagggcacctgtgagcactggagtcaggtcctgtccctcctctgcccacagccctgcatggctcccacccgcctgggggtcaaagcccaagacctccccatgacccaccaggccctgcttaacctgccccatccccttttcgccctcccctcctccctctctgcccgtcgctcactctgctccagcctcctcgctgttcctccaacacaccaggtgccatctgcccccagggcctttgcatgggctgtgccctctgcctagaaggtcattcccactttcacctccagctcttcccatgactgactccttttcttccccccaggtctcaactccaacaccccctcctagagagccccttcggccacccctgctgaaatt[136 bp omitted]ctgcctcagcctcccgagtagctgggactacaagtgcccgccac[187 bp omitted]gctggagtgcaatagccccatctcagctcacagcaacctctacctcctgggttcaaatgattcttctgcctcagcctcccaagtatctggaattacaggcgcgtgccaccacgcctggctaattttttgtatttttagtagagacgaggtttcaccctgttagccaggatgatctcgatctcctgacctcatgatccgcccgcctcagcctcccaaagtgctgggattacaggggtgagccaccgcacccagcccgaaggctcttcactttctgaaactattttgctttcttcttttataatttgtttactattccttcctctcctcccctacggaaatgacagccaatgactaatcacttctgtctgctgtctgggacaactcccagcacacagtaggcgctggatgaacgttggtcaaatgaaggaatagccagttcactgcccctgctcaggtatttgcagctggttccggcctggatggtccgaaaccctttgttgggaacaacctcactgcaccctggaatctcatctcagaactccactccccaggtttcacttctgggccgctgcggctgccaccgggaccagagctctgacaaagtctgagtcaacaactaaaatagcaagtagtgcatggctgctgggtgattcacaccagcctgcttccatgtggcctggcaatggaggaaggagcctgcaaagtcaaatcaggttgtcaggagggaggggctcctcagcttcccagctcagtgagtccagtttcaccttcgaggaccctcctttgtttcctcccttggaagttcagctccttccattgtgattccccgtttctgatctgtgtgagttttggagtcagaattaatctctttaggcctcggttttccccatctgtaaggtgggtccataatagaagcttctaccttgaggggtcattttgaggatgaaaatgtgtttgtttatttatgtatttaattttttgttatatagatgaggccttcctatgttgcccaggctgatctcaaacgtctggcctcgcctccttacacgccaggacaacgggcctgcaacaccgtgcctccctatttatttttattttattattttattgttatttttggagatggagtttcactctcgtcacccaggctggagtgcagtggtgcaatctcggctcactgcaacctccacctcccgagttcaagcgattctcctgccttagcctcccaagtagctgggattacaggcacccaccaccacacccagctaattttgtatttttagtagagacggggtttta[132 bp omitted]gatacagagtcttgctctgttgcccaggctggagtgcagtggcgcaatctcagttcactgcaatctccgcctcccaggttcaagcgattctcctgcctcagcctcacaagtagctgagactacaggtgtgtgccccatgcccagctggtttttctatttttagtagagacagggtttcatcatgttggccaggctggtctcgaactcctgacctcaagtgatccgcctgccttggcctccaaaagtgctgggataacagatgtgagccaccatgcctggcctatttatttatttattttttaaaaagagttggatgtcttattcagttgataaataaataaatacatacataaataagaaagatgcggctgggtgtggtggcttacgcctgtaatcccagcactttaggagcccaaggcaggtggatcacctgaggtcaggagtttcagaccagcgtggccaacatggcgaaaccccatctctactaaaaatacaaaaattagccgggtgtggtggcgagctcctgtaatcccagctactcgggaggctgaggcaggagaatagcttgaacccgagaggtggaggttacagtgagctgagctctcttcactgcactccatcctgggtgagagagccagactccatctcaggaaaaaaaaaaaatagagatggggtttcattatgttgcccaagctggtcttgaattcctggcctcaagcaaccctcccacttcaacctcccaaagttctgggattaattacagatgtgagccaccacagcacccagtcttgtttatgtatttagacactccagaatcaatacatgttaagtgtccaacaaaccttggctccattcttattcttagaaggtctgtcaccctgaaaaatattaatcccttccatgtgggtccccatacttaatgagtgctgcacctgctacccaggtatggtgtacctgatatgtggttctgcatatgatccgctgaggccttgaaacaacagcctccacagacccatttctcagatgaaaaagcagaggctccgacaggggaggcacttgccaaatgtcacacagtggcatcggagtccaaccttggtgggggcatcaaaggcagaccccaaagaaaaaggaagggctgcagcaaaaactgctaaatgtcccccaatggcattcattcaaattcatgcatttattcactcatccattcattcactcactcattcattcattcactcatcctttcactcactcatccattcactcattcattcactcactcgttcattcattcactcattcattcactcactcgttcattcattcactcattcattcactcgttcattctttcactcattcattcactgactcgttcatttattcactcactcattcactcattcattcattcactcactcgctcactcattcattcattcattcattcattcattcatagctcactgcagccttcggctcctgggctcaagcaatcctcccacctcagcctcctgagtacctgagactacaggcgtgcaccaccacgcccagctaacttttgtatttttgaagagacgcggtctcaccatgctgcccaggctgcaccctccccgccctcaacaatatcttttccctccacctttcctggtattagaaccccgactcgggaggcacacggccgttcagaaaggactacatttcccagggttccttgcggcaggagcagggccatgtgattatattctggccaatgggatgagggcaaaggccggtctatgccctccaagaagaggcgtgcacttcccgcttcctgttcccttttgcgggagcgggagccacgtgttttataacaaatagccaggcagaaggtgtcccagaagacaatggcgctgcggaagcattcaataaatatttattataattaaaagaccgtagcaatacccccaccaccaagacccttcacccagaaatagagagattggaattgtaaacaccgtatccagttctgaccaccctgaaagccagggcatcatcgcgcccgttttgtcctaaatgaagggctcccggacaatgtcctgaaagtggcagatgacctcatcttccactgtccacagggcacagggcagaccggggtgctctatggggtcctggccgatgcctgggtccaggggtgttccccaggtggtcaggcaaggacacgcggtcattctgcctcctgcgtcttgtcctcgggcgcctgggaccctctctggttccacatgtggttgttcagccccagctgtaccatctgtgcgtggtggataatgaggggttgcagccctgggctctgagggggtgcgggtgaggccgtagggaaggctggggactgcgggaagggcagtgactgtggaaaggctgctggctgtggggagggcggtgggggggtgccagcctgccatgcgtgcaggggtggcggctgcgggcaccccggccaagtgggaaagggtggcggggctcccaggggcacctggcccccaaagggcattcgagccccatagggcgccccagtcccaaatgacatgtggctcccaaaagccacctggagctgctccatctgtgcctggtaggacaagtagctctggaggtaggctgagtaggctgcgttcagtgccgccgcctgcatccgctcaccgtccaggtgttggctctgttcccgcagggctcgggtgtcctgttccttcctccacatggcctttcgggcctgaagcctgtggggcttgaaggtgttggccaccttcctggcgaagatctgggagtgttcgtccagccgcaccagcccggagagcaggctggccgtgtcggagctgagctgggccggggagctctccaggggcaggaaggggatgacacagtctggcgacccctgtcgcgtgaggttgctcatcatggcttggttcacctggtgcaggctcaggcgacagtcgaagttggaggtgagaagtaggatgatgaaagctgagtggtctatggcgtcctgcaggcagctcagctccccgcgccccggcacctggaaatcctcgcagaaggtggccccgtcgggcacgccaagggcctccagcttctcccgaacccgcagggcgatgtgttcgtctgccctggcgtggaggatcacaaagttatagaatttctgttccgatgatgattccagggaggaagggaacagggaggagggggtcaggtgagctgaacaaggagtagatgaaggaggaggaggaggaggaggaggggatgtttctggggtggtgggagtaggtgggcacggcttggtatttggagaggtggtatcttctacagaaagttggagtggcgtctggtctttgacagagcaggggtttttgaccggctccagaataggcaaggggagagactgggggcctgcagacccctcggtgcactccactgggtagttggtgctggtttctggagctgcgggggtatcagggaggccagtggaggttgcatctggggccacttcgggaagcccaggaggtgggctgcttggcagctctggtgggctggcaatctcccccgatggcggccagctcatctcctcaggctcctggcagccaccggggacaggctcgggcaccaagctggcctgggggtcgtcacagagcttgctgggcccatgtgggctgcggtgcaggctgaggaagggcatggtaggggactggctgatttccaagttgctggccagggaggcagggctgccagtggatcgcagggagcacccttggctccagtccgaaacaccgtcaatggggcgtgggaggctcctggtcccagagggcaaagccgaggatggtgggaggcagcccagattggactggagcgtccggatgctccctggatccccagcaatgtcccacccacaccggtttcgggcctcatcctgaagttcccccagccggtggtcgtccctggagctgagggtgcggacggcttcctggtaggccacgtcccgcagcgaggcggggcacagcttctcctcagccagcaggtggtacaagcgggccacagcccaggacacatctgggggctcctctgggtcctcggtgctgtccacgccagcccactggcgggccaccagccgggccaccgcatcggccttcaatgcctctagagagatcctggcctcagtttcctggcccagcttcaggagaaccatggcatgcaggaggtcctgcccctggcagcctgggcgtggggtcttcagtttgtgcttcagatacaagagcttgtcctggcctgctgcacctagaatgtcgaaggcgctaggaagtgatgggcctgtgcaggccatgggcacaggtgggtgcagcctccggcagcagaagctggaggtggtgaaggcatgttccacactgccccccgccttctgcacgcccagtgtcccctacccattcactgttccaggttctgcaggagctgcccaagcagatctgtaggaaacaggagaagcaaacacacttacccccaagaaaggtcagcacgggaaggcggcccacacacccccgcctgctttccccgcctgccacccagacctagccaggtgaccttcggcaacacgtcgcctccttcaacttccatttcttcctctgcaaaatgctatgaggccagtgtggtggctcaggcctgtgatctcagcactttgggaggctgaagcaggaggatcacttaagcccaggacttcgagaccagcctgggcaacacagccagactccgtctccactaaaagtttaaaaattagctgggctgggtgagggggcttaagcctgtaatcccagcagttgtggaggccgaggcggggggatcacctgaggtcaggagttcgagaccagcctggccaacatggtgaaaccccgtttctactaaaaatacaaagaattagccaggagtggtggtgcattcttgtaatcccagctacttgggaaactgaggcaggagaatcgcttgaacacaggaggtggtggctgcagtgagccaagatcatgccactgcactccagcctgggcagcagagtgaaactccggctcaaaaaacaaaaaaagtagctgggcgtggtggcacgtgcctgttgttccagctactccggaggctgagatgggaagatcgcttaagcccaggaggttgaggctgcagtgagctatgatggtaccactgcactccagcctgggcaacagagtgagacccagtctcaaaaaaaaaaaaaaaatgctgtcatctgagacttacctggtgttacctgagaggtaaacactattacactattttccccatttacagatgaagaaagcaagacacacagaggtgatgtcacttgcccaaagtcacactatcagtggatggcagaagacggatttcaacccaggcagtctggctgtggaggctgtgtgcctaatggcatacacttacagacttgttttggggaattgagttggattaacacagagatacttctgagcttgatgactgaaagccagtaggtgctcaatacatgcttgctaaatagcctcggctgagcacggtggctcacacctgtaatcccagcactttgggagtccaaggagggcggctcacctgaggtcaggagttcaagaccagcctggccaacatggtgaaaccccatctctactaaaaatacaaaaaaattagccgggtgtggtggtccgcgcctgtagtcccagctactcaggaggctgaggcaggagaatcgcttgaatccgggaggcagaggttgcagtgagcaaagatcgcaccattgcactccagcctgggcaacaagagcgaaaccccgtctcaataaataaataaatagtcagccttctagatggtcctcaaggacccaacatcctggtatttgcagtcttgagcagtccttccaacactgtcccagcgttggactatgacattaacagaatatggcaagggagccaggcaccacatccactcatttttcaagagaagccagagatctagatttttagaaatccgctcattcttctcgggatgacaatcaattccaatatttttaagagactttgtgagtttaaaaaaaagtttgggccaggcgcagtggctcacgcctataatcccagcactttgggaggc[135 bp omitted]gaggtaggaaaatcgcttgaacctgggaggcggaggttgcagtgaaccgagactgcaccattgcactccagcctgggcgacagagtgagactccatctaaaaaaaaaaaaaaaaaagtttggagccaggcctggtggtgtgtgcctgtggtcccagctactcgggaggctaaggcaggaggattgcttgagccaaggaagttgaggctgcagggaaggatacatacatagcattcattcattcatttaagaagtaattttttggccgggcgcggtggctcatgcctgtaatcccagtgctttgggaggctgaggcaggtggatcacaaggtcaggagttcaagaccagcctggccaacatggtgaaaccctgtctctactaaaagaaaaataaaaaaaataaaaaataaaaaatttagccgggcatggtggcgtgtgcttgtaatcccagctacttgggaggctgaggcagaagaatcgcttgaacctgggaggtggaggttgcagtgagccgagatcgtgccactgcactccagcctgggcaaaagaacaagactccatcaaaaaacaaacaaaaagaagtaatttttagccaggtgtggtggctcatgctgctaatcctagcactttgggaagctaaggcggacagatcatttgaggtcatgagttcaagatcagcctggtcaacacggtgaaactcccgtctctagtaaaaaaaaaaaaaaaaattgccagacatggtgttgggcacctgtactcccagctacttgggaggctgaggcaggagaatcacttgaacccaagaggcggaggttgcagtgagccgagatcacgccactgcattccagcctggatgacagagtgaaactccatctcaaaaaaaaaaaaaagtaattttttcagcatctgccatgtattgggtactagtgaatacaccagtatgcagacaaggaaaaacagcaatggactcttccctggagcaactgactgtctaatggtatgttagttatatgtaatatataagcatcatatatattacatacgacaatataacgggcatgtgtggatacacacacacacttacatgcaaccacttatttgagggcttactacatgctatattgtgctccccatctgttctttaaactgggcacagtcctgcctcaggacctttgcactggctgttccctctgcctatatctctgttaccccccagatatccctatggctcactcccttaccctccttcatgtttttggttaagcctgtcctgatcccaccgtgcagatctccctttgacaggggccacaaaatatggcccacgatttttttttttttttttgagacagagtctcactcttgttgcccaggctggagtgcaatggcacgatctcggctcaccgcaacctccgcctcccgggttctagcgattcttctgcctcatcctcccaagtagctgggattacaggcatgcaccaccatgcctggttaattttgtatttttagtagagacggggtttctccatgttggtcaggctggtcttgaactcccaacctcaggtgatctgcctgtctcggcctcccaaagtgttgggattacaggcatgagccaccccgtccagcctttttttttgagacagagtttcactcttgttgcccaggctggagtacaatggtgcaatctcagctcaccgtaacctccacctcccggattcaagcaattctcctgcttcagcctcccgagtagctgagattacaggcgtgcgccaccatgcccggctaattttgtatttttagtagagacggggtttctccgtgttggccaggctggtcttgaactcccgacctcaggtgatccgcctgcctctgcctcccaaagtgctgggattacaagcgtgagccactgtgccggccaattgttttttagttttgtcttgttttgacacagagtctcgctctgtcgcccaggctgcagtgcagtggcatgatcttggctcactgcaacctccacctcccaggttcaagcgattctcctgcttcagcctcccgagtagctgggaccacaggcacccgccaccacgcccagctaatttttgtactttttatagagacggggtttcaccatattggccaggctggtctcgaactcctgaccttgtgtgatccgcccaccttggcctcccaaagtgctgggattataggtgtgagccactacacccagccaattgcttttataaataaagttttattgcaacacagacatcctcactcatttacacacatcgatggctgctttcccactagagtgatggagtagctacaacagagaccatggggtctacaaagtggaaaatattcactctctgacccttgacagaaaaagcttgtagacacctgggttatgagacaggcatgtgattttttttattttccattccacagaggggcaaacatgaccaagatcacacagctagtgactgacagagcagccatttgatgccaatgtttgtaactgtaacaccaaatgccttttaattagtatggggtatgactggctattatgggttcaatcgtgtctctccccaaaatcatatgttgaagtgccaacctccagtagctcagaatgtgactttatttagagaaaaggcctttttttggtttgtatttggctttggtgtttttgtttgtttgtttttgatgttgaaagtatttttatttggccgggcctgacggctcatgcctgtaatcccagcaatttgggaggtggaggtgagctgatcacttgagatcaagagctcgagaccagcctggccaacatggtgaa[141 bp omitted]cgaaactccatctctactaaaaatgcaaaaattatccaggcatggtggcgggcgcctgtagtcccagctactcgggaggctgaggcaggagaatggcgtgaacctgggaggcggagcttacattgagccaagatagcgccactgcactccagcctgggtgacagagcaagactctgtcttaaaaaaaaaaaaaaaaaaaaattagccaggcatggtggcatgcgcctgaaatcccagctactcaggaggctgaggtgggaggattggttgagcctgggaggttgaggctgcagcaagcaagctaagatctcgccactgcactccagcctgggtaacagagcaagaacctgcatcaaaaaaggaaaaggcagggggcattcagatacagacacgtaactgcacagaaggaagatgatgtgaggagacccagggagaaggcggccgtctgcaagctaaggagagtcctcagagggaaccaaccctacaacacctcgatcttggacttccagcctccataactgtgagagaataaatttctgttgcttaagccatccgggctggggcactttattaccacagccacagtagctaatacactgcagatacttgcagtctagatcagcctcaacactctctgtctgtgttgtccagtatggcagcccccagctacctgtgtctactgggcacctgaaatgtggctgtggtagtaaagagacactgaattttaattttttttttttttaggatgaagtcttgctctgtcgcccaagctggagtgcagtggtgcgatcttagctcactgccacccccctctcctgggttcaagttattctcgtgcctcagcctccccagtagctgggatcacaggcacatgccaccacgcccagctaatttttgtatttttagtagagacagggttttgccatgttggccaggctggtcttgaactcctgacctcaagctatctgcctgcctcagcctcccaaagtgctgggattacaggtatgagccaccatgcctggcttgaattttaacttttatccaattttttttttttttttttttttggagacagagtctcgctctgtcatccaggccggagtgcagtgacgcaatctcagctcactgcaacctccgcctcctgggttgaagagattctcctgcctcagcctcctgagtagctgggattacaggttcgcaccactatgcccggctaatttttgtatttttagtagagatggggttgcctcatattggtcgggctggtctggaacccctgacctcagatgacccacctgcctcggcctcccaaagtgttgggattacaggcgtgagcc[132 bp omitted]gaaatcccgtctctactaaaaatagaaaaattagccacgtgtggtggcgggtgcctgtagtcccagctactagggaggctgaggtgggagaatcacctgaacccaagaagtcgaggctggagtgagcagagatcacaccactgcactccaacttgggtgacagagcaagactctgtctccaaaaaaaaataaaataaaataacagagcctgcttaagggtggtggtgaggaggagggagaggagggtcgggagcggtggctcacgcctgtaatcctagcactttggaaggccgaggtgtgtggattgcctgagctcaggagttcgagaccagcctgcgcaacatggtaaaaccccgtttctactaaaatacaaaaaattagccgggtgtggcagtgtgcgcctgtaatcccagctgcttgggaggctgagggaggagaattgctggaacccgggcggcagaggttgcagtgaactgaaatggcgccactgcactccaccctgggcgacagagcgagactctgtcttaaaacaacaacaacaaaaaactacctatcaggtacgacagttattacctgtgtgatggaataatctgtacaccaaaccctgtgacatgccatttagctatataacaaacctggatatgtacccgttaatttttgtatttttgtagagactgggtctccccatgttgcctgggctcaagtgatcctcccaccttggcctcccaaagtgttgggattacaggcgtgagccaccgcggccggcattttatctaatttttaattaattaaggcagggtgcagtggctcatgcctataatcccagtactttagggggctgaggtaggaggatctcttgagcccaagagttcgagaccagcc[137 bp omitted]cacagtgaaaccctgtctctactaaaaataaaaaatattagcagggcatggtggcaggtgctggtaatcccagctactcgggaggctgagacaggagaatcgcttgaaccgaggaggcagaggttgcagtaagccaagatcacaccattgcactccagcctgggcaacaagagcaaaactccatctcaaaataaagaaacaaacaaataaataaataaataaaattaaaataaaaataattagctgggtgtggtggtgcatgcctgtggccccagctccttggtagactgaggtcagaggatcgcctgaggccaggagaatcaaggctgcagtgaccggagatcgcgccactgcactccagcctgggcaatagagtgagacgctgtctcaaaaacaacaaaataaaaaaggtatggaagatgcctcattcgtaatggaacattatattggaccatgttgggtatattgagttaaataaaatatattattaaatgcatttacatattggattaataaaatgtattattaggagatatatatatatatttatttatttatttatatattttggagatggagtcttgctccattttccaggctagagtgcaatggcatgatctcgactcactgcaacctctgcctcccaggttcaagcgattctcttgcctc[222 bp omitted]catctccactacagtccagtaatattggagtatggcccctttttgacacaaggaaacagaggtacagagaagttgagtaagtagtccagagtcacacagctcataagggatacagctggattggaacccaggctgtctggttctagaatccactgagctttttggctccttttaacattttcagatttaacacagactccagcttatgtggacctggttatggggcctgagaaacagcctcacctagttttaattaaactaatgttcaggaaataagcatatggcctaagtactcctctagagaagtggaggataaaaggtttttcctaataatcttaggaaataataataataataataataaaataatgcaggcacaatcggacaataagaaaaaggccagacggccgggcgcagtggctcacgcctgtaatcccagcactttgagaggccgaggcgggtggattgcctgaggtgaggagttcgaggctagcctggccaacatggtgaaaccccgtctgtactaaaaatacaaaaattagccgggcatggtggcgcaagcctgtaatcccagctattcgggaggctgaggcaggagaatcgcttgaacccgggaggtggaggttgaacccgggaggcggaggttgcggtgagctgagatcatgccattgcactccagcctaggctacaagagtgaaactctgtctccaaaaaaaaaaaaaaaaaaaaaaaaaaaaaaagaaaaaggccagatgcccagcttctatctctgttgtaagctctacataaaatgggataaaaatgaaaatgggctgggcgcggtggctcacgcctgtaatcccagcagcactttgggaggcc[134 bp omitted]gaggcaggagaatggtgtgaacctgggaggcggagcttgcagcgagccgagttggtgccactgcactccagcctgggtgacagagtgagactccatctcaaaaaaaaaaaaaaaaagatcctatattcaggtgggaccacaagtcggccaaaactttttgaaatgatcaagacaactacttggaatacggtccaatacccccaccccccgttaagttcgatgatccacgaatcaactgctcttcccacctcccggtgtttcctgggaacggttgtgtgtataacttaccaagcaaaaagcaaacatacattggcacgtaccctccaatttttagctgataagagggcatagatgataaagtgtggagaagggccatgctgggacagggtagcagtggggctgggcgtcatgctgaaaattcattgagtttaacacttagaattcacactcttttttgttttttttattttttttgagacggagtctcggtctgtctcccaggctggagtgcagtggcgcgatctcggctcactacaagttctgcctcccgggttcccaccgttctcctgcctcagcctcctgtgttgttgttttttgacaggatcttgctctgttacccaggctggagtgcagtggtgtgatcatagctcactgcagcctcaacctcctgggattaagaagtgatcctcccactcagcctcccaagtagctgggactacaggcacatgccaccatgcccagctaattattaatgttttgtagggacggggtctggaactcctgggcccaagcgatcctcccaccttggcctcccaaagtgctgggattacaggtatgagccactgcacccagcctacatgtcagtaaaatatatatacatatatatattttttgagacggagtcccactttgtcgcccaggctggagtgcagtggtgcgatctaggctcactacagcctccgcatcctgggctcaagtgattcttgtgcctcactctcctgagtagctgggattacaggagcctgccaccacgcccagataatctttttttttttttttttctgagaccgaatctccctctgtcgccaggctggagtgcagtggcgcgatctcggctcactgcaacctccacctcctgggttcaagcaattctcctgcctcaccctcccgagtagctgggactacaggtgcatgccaccatgcccaggtaatttttgtatttttagtagggacggggtttcaccatgttggccaggatggtctcaatctcttgatctcgtgatccgcctgccttggcctccaaaattctgggattacaggcgttagccaccacgccctgctagtttttgtaattttagtagagacagggtttcaggctgttggccaggctggtctcgaactcctgacctcaatcgatccgcctgccttggcctcccagagtgctgggattacaggcatgagccactgcgcccggcctgtataggactcttaaagcagtgcctggcacacgcatgccccacaaacattagcatgcaagactgaaacctccttgcaagaaggactcaggggagttttgcagaaaacacgacaaagccagccagacttagaatcatcaaggcaggaccatctccacctgaatgcctggcaaatctctaaaatcacgtggtctttcttctcattctctctgcccccccgggcctgaactcaactctatttcagtgactgccccagcttcccccgcccgcctcccctgcccactgccacctccaccttctcgagacccagcaagtttcatttctcactgtccatggctgggacaaagtccactcctcactctgaagagcaggcgcctggcgggacaaaaacacccatggggtaggagggttctggctctgccacctgccggcttgtgtggtctgtttctcagcctcagcttcctcatttataacacccacatgaactggtacttaggatgaatgggagtctgttttgaagctttcatgcgaaaatatggttaaaaagtttagatcagtgcccagcaaggagcaagagcttgatataataatattagtgtgacaataaatattggcagactttttctcttcctcttcctttttaaaaaaatttttgatttttaatttcatttctttttttttttttttttttttttgacacagagtcttgctgtgtcgcccaggctggagtgcagtggcgtggtctgggctcactgcaacctccgcctcttgggttcaagtgattctcctgcctcatcctcctgagtggctgggattacaggcatgcaccaccacgccccgctaatttttgtatttttagtagagacagggtttcgccatgttggtcaggctggtctcaaactcctgacctcaggtgatctgcctgggattacaggcgtgagccacctgcccagccccatttcattttttttagagacagggtctcactctgtcacccaggctggagtgcagtagtgggatcacggctcactgcagccttgaactcccgggttcaagtgatcctcccacctcagcctcccgagtagctgggactacaggtgtgcggcaccacacctggctaatttttgtatttttggtagagacagagtctcacccatgttacccaggatcctgggctcaagcaatccacctgcctcagcctcccaaagtgttgggattacaggcataaaccactgcacccggctaactttctttttgaatttttttgtagaggtggagtctcgctatgctgcccaggcttgtcttgaactcctgggctcaagtgatcctcccaccttgtcctttttaaatgttttaaccacctctcccactctccttcccacactctcatgcagcctttcatgcatcgaatatgcatttattgagcacctactaggtccaggaactgttcaaagtgccactgcatatcaaggcaggcacatctaccctcacagagctcccagtctggttcagggagaccaacagtaagcgagaaaataacccaagatcatttcagagaatgaaaagtaacgtgaaagccatgagccgggggctgtgtggctctgagagactggctgggaaggggctacaggggaccacggtggtcaagggaggcctttggggacaggaggtaacattgagctgagacctaaaggagctgagggaggaggctgggtggagatcagggaggaaagcttctggaaggtgaagccacctgcccaaaggccctggggcaggactgcgcctggtgagctggaggaacagtaaggaagcccatgtggctggataaccgttaggagggggagaaaggaagaaggtgtgtggtggtacagggtgtgaggttgggatcctgggtgtcagggaagagtttggggtgtcagggaggaatttggggtgtctgggaggaatctggggtattcgggagggatcctgggtgttggggaagaatccagggtgtcagagaggggtcctgggtgtcacggaggaatttggggtatcagggagggaccttgggtgtcagggagaaattcagggcgttgagagaaatatggggtgtgaggtaggaagcttgggtgtcaggaatttggggtgagaaggaatatggggtttcaggtaggaatcctgggtgttggggaggaatctggggtgtccgggaggaatctggggtttgggggaggggtcaggctgtcggggaggaagccagggtgctggggaggatcccgacagtgggggaggatctgggccaccagcgcggggagctggaggttgaggggaacgtcaacctcccaacgcgcggcgccaggccccctcctccgcaccggggccctaagagggaggccaggtggcctggagccctggcgagcggcacgggctcagggccaccccccacacccccgacaccttctccacctcaggcccgtcctcgccccttccccacctaccagggatccggggctgccggctgcgccactgggtcctggggtcctgggggctggggcttctgcggagttgcccgcggaccgtagcgcgctgagggcgctggctccaccccgcggcccgcgccctgggaaggaagcgcgccgccccttccgcgtcccgggtgggtgtgggacgtgaggtcacggtttcggagtcctgccccgcagcaccgggaaagtccccgggtcgccccgcacccatgcgctctcttcccaacccttgcggtcacgttcagcaagtgtgagcacctactgtctgcagggggccagaagaactcgcatctgctctcggggagcccacagtcatctgggcgggggtcccagatgagaaagtaatcacaattgtaaagtgggatcatctccgttagtgataggtgctttccaggaaataaatgtagcagctgtttttattttatttctcttattttatttgtttgtttgtttatttatttttttatttattttccgagacggagtttcgctcttgttgcccaggctggagtgcaatggcgcaatctcagctcactgcaacctccgcctcccgggtccaagcaattctactgcctcagcttcctgagtaactgggattacaggcatgtgccaccacacctggctaattttgtatttttagtagagatggagtttctccaccttggtcagcgtggtctcgaactcccaacttcaggtgatccacctgccttggcctcccaaagtgctgggattacaggtgtgagccaccgtgtccggcctcccttttttttttttttttttttagttggagtcttactctgtggcctaggctggagtgcggtagtgcgacctcggctcactgcaacctccacctcatgggttcaagcgattctcctgcctcagcctcctgagtagctgggattacaggcacgtgccaccacacctggctaatttttgtatttttagttgagatggggt[143 bp omitted]ggggtctccctatattacccaggctgctttcaaacttccaggctcaagcaatcctcccgcctcggcctctcaaagtgctaggattacaggtgtgagccaccgcacctggcctatattatttttatcaccacattaaataagatctaataatcacagtgattttgccgtggtgacaagtgtcagatgtgtttctggttgcaatgcaatctgaaagtatctgtggtttttattagggacaaacggacaaagtcccaggtcctgtggttgtcttcattaataattgagggaatggtaattatcagttagagtcagtgaaaataaagatgtgaaatttttttcctccatcagaattcacagacaccctgaacacccctaagaggctcagggaccccaggctgaagttcacctaaaagttcttgtagggagatagcaatggaagttatgttgatgtcaaatcccccacagttccccttattgagtacttctctccagtgagggagaaattttattgagcactgactgtgttccaggaacgtctaggctctgggaatacagtagcggggaagacagaaatggtcttacccttcagggtctccagggctggtgggggagagaaagttaaacacatcctcctggcctctctgtctcccaccccaaaattaccaattcaaggagtgtctcataggtgcttgtacccatgcaaaactgtgcccagactttttttttttttttttttttgagacagaatctcactcagtcaccaggctggagtgcagtggtgcaatctcggctcactgcaacctcagcctcccgggttcaagcgatcctcctgcctcagcctcccgagtagctgggactacaggtgcatgcccccatgcctggctaatttttgtatttttagtagagatggagtttcacc[136 bp omitted]caggccggagtggagtggcgccatcatagctcaaagcagcctccaattctgggcctcaagcgatcctcctgcctgagcctcccaagtagctgggactacaggcacgcaacactgtgttgaattattttttacatttttcttttagagacagggtctcactatgttacccagactggtccccgactcctagctttaagagattgtcccaatttggcctcccaaagtggtgggatta[132 bp omitted]ctgtagccttgacctcctggtctcaagcgatcctcccacctcagcctcccaagtagctgggactgcaggtgcatgccaccatgcctggctaatgtaattttttttttcttttgtagagatgatgtctttctatgttgaccaggctggtttcaaactcctggcctcaagcaatcctcctgccttggcttcccaaggtgttggaattacaggcgtgagccaccatgcctggcttgatcaatgtcttaaaacaaccgtttctccatcaaaatgggtttgatggttcccattttacagatgagagaacaggctcagagaaggtaatggctgaagaattcagaattccagggctgcagatgggtgaatttggccacttgcagagaggtgcagttgccccctctcttcttcagtgaaagaaacaggccgggtgcggtggctcatgcctgtaatcctagcactttgggaggctgaggcgggaggattgcttgagcccaggcgttcaagactagccctggcaacacagtgagatcccatctctacaaaaattaaaaataaagaaaaaatgagggccgggtgcagtggctcacgcctgcaatcccagcactttgggaggccgaggcaggtggatcatgaggtcaggagatcaagaccatcctggctaacacggtgaaacccctgtctctactaaaaatacaaaaaaattagccgggcgtggtggcgggcacctgtagtcccagctactcaggaggctgaggcaggagaatggtatgaacccgggaggtggagcttgcagagagccgagatcacgccactgaactccagcctgggcgacacagcgagactccatctcaaaaaaaaaaaaaaaaagaaagaaagaaaaaatgaggcatggcagcacgtgcctgtagtcccagctacctgggaggctgagatgggaggaccaccagagcccaagaggttgagactgtagtgagctatgatcgcaccactgcactccagcctgggcaacagagagaaaccctatctcaaagaaaaaatataaaaaaaaaaaagaaagaaagataatattccagtaaaagtccaagttttttttttactttccctctccaccacctcccctagaagcctccacc[139 bp omitted]tacttcagcctcctgaatagctgggattacagctgtgcgccaccacgcccagctaatttttgtatttttagtagagatggggtttcaccatgttggccaggctggtctcgaactcctggcctcaagtgatctgcctgcctcagcctcccaaagtgctgggattacaggcatgagccaccatgcccggcctctgttttccacttttgcacacatatccacagatccgtgatcatgatactgaatattcttcgatctgattttcctttttaattcgcataggccagagttcagcaaactgtttgttgt[131 bp omitted]cccgtctctactaaaagtacaaaaaattagccgggcatggtggcaggtgcctgaagtcccagttactcaggaggctgaggcaggagaatggtgtgaacctgtgaggtggtgcggcttgcagtgagctgagatcgcgccactgcactccagcctgggctacagagcgagactccgtctcaaaaaaaaaaaaatttactgtattccattgtcaatatatctttgacactttcacaagtcaacatatgtgtcatgtatgatattccaaaacaggcattgctaccttaa[136 bp omitted]atcctgggctaagtgattcttgtgcctcagactccccagtagctgggattacaggtgtgtgccaccacacccagctaatttttgtatttttaatagagagggggatttcaccatgttggccagcctggtctcgaactcctgacctcaagtgacctgcccaccttggcctcccaaagtgctgagattacaggcgtgaggcaccatgcctggcctgagttcaaattactactcagctattagtagctgaggtggggctgagggtgggctctctggattacacctcattttccctggagataatagcatctatctgatgggattgggaaaaagatcgggtgagagccaggtgcagtgactctcacctgtaatcccagtgctttgggaggttgagtgggaggtcgcttgagcccaggagtttgagaccagcctaggcaacatagcaagacccacatctgtgtgtgtgtgtgtgtgtgtgtgtgtgtgtgtgtataatttagctgagtgtggtggtgcacgcctgtagttcccagatactcaagaggatgaggtggggccagatgtggtggctcacacctgtaacctcagtactttgggaggccgaggtgggcagatcacttgaggtcaggagtttgagaccagcctggctaacatggtgaaaccccatctctactaaaaatacaaaattacatcctggctaacacggt[143 bp omitted]gtactccagccttagccgggcgtggtggtgcacgcctgtaatcccagctactcgggaggctgaggcgggaaaaccactcgaacctgggaggtggaggttgcggtgagctgagatagtaccactgcaccccagcctgggcaacagagtacaactctgtctcaaaaaagagcgaaaaaaaaaaaaaaaaaggctggcatagtggctcacgcctgtaatccagcactttgggaggccgaggcgggcagatcacttgaggtcaggagttcaaagccagcctggccaatatggcaaaaccccgtctctagtaaaattcaaaaattagccgggcatggtggggcacgcaccagtaatccctgtggctgttggttatagggagtggattcctatgtaacattcattgaactgtccctttaagattcatatacttgggtgcatatgaattcaacttgaatatggattaacaaagagaaagtaacatgtggttggtgatgggggaaatgaaccctctcaggacttagggtgggagtgaaaagactgacaatgatttgggcaacagtccagcagtatttagtaagactgagaatgtatcttctccatgtccctgggagaagtccctgaagttccccttctctgtagctaccgtagagaaacactgtagattgtcacttggatttttttccgagatggtatcttgctctgttgcccaggctggagtgcagtagtgcgatcttggctcactgcagtctcaaactcctgggctcaagtgaccctcccaccttaccatgcctggctaacttaaaaaaaaaaaatttgtgtagagatggggtcttg[141 bp omitted]tgtgagaaatcaatttctgttgctcataaattacccagcctggccaggcactttgggaggacgtggtgagaggaacgcttgagctcaggagttcaagatcagcctgggcaacatagcaagaccccgtctctacaaaataaataaatgaataaataaattaccctgcctaagatatttctgttctagcagcagggacagatgaagacacacacacgtacacacatggcctgtatgcagttgtgggtgaagtttattaaggcaatactgaataccagagcatttcaacaaggcttaccacacaggccccagtacctttctactctacaatgaggctcagaagctcagtgtaccaccccatccccaggaggcccacttagaccagaaatcccaagtccattagctacaggctgatattcagggacatcggtgtaaacaaagaagtgggatatgaactatatccctgatttttttttctttttttttttttttgagactaagtctcactcttgtcccccaggctggagtgcaatggcgcgatcttggctcactgcaacctccgcctctcaggttcaagagattctcttgc[137 bp omitted]cagcctcccaaagtgctgggattacaggtgtgagccaccgcacccggcctatattcctgatatttaacaaggaaaaaaaattctgcaggggagaactttcctgaaagatattttttctggacatctctctctactgactgatagggtgaggctcagaacaggcttcttccaagctcagagaggctgagagatgggtcaactgggtgatgcccgttttgagagccttagcttcccaagtggacagcacagaagagctgggaggagtggctagaaaataagtttgaaatgagccccgggttgaggactccagagcacagctgcattatagagacggggcccgctgagtcctctcctctccccctacttcttctcctccggggctttctcagtgattccaggggcaaagggtcccacgagccacgtgacaggtgtgttctgggccacatattccaccatgtggtccagggcctcgcgggcgctggcgacacgctcacggctctgggccagaatgctgctggacaggtcctggaaggagtggatgctggaaaacgtggcctggaggtcctccacctggcggcgggcctgctgcacctggtccttcacattggtggggaggccctgaatgctggaccccagggaggtacaggtggcctgcagttgctgggcaatgtcccggaacatggtgagcgcccgggactcgacctgctgagaagggagatggggacaccaatcaggaccatttgtttcaggaaaggcgatcggagctgaagccagggaaagaggggaagaggggttctaccactgaccttggggcaaacgctttccataggcgaaacttttttttttttttttgagacggagtctcgccctgtcgcccaggctggagtgcagtggcacaatctcaactcactgcaagctccgcctctcaggttcgcgccattctcctgcctc[134 bp omitted]ggcctcccaaaatgctgggattacaagcgtgagccaccgtgcccggcccttttttttttttttttttttgagatagagtcttgctctgttgcccaggttggcgtgcagtggcatgattttggctcactgcaacctccgcctcccaggttcaagcgattctcctacctcagcctcccgaatagctaggactacaggcgcgtgccaccacgcccgtctaacttttgcatttttagtacagatggggtttcaccatgttggccaggctggtcttgaactctacctcaagtgatcggccctccttggcctcccaaagtactgagattacaggcatgaaccaccgcgcccagactcttttcttttaattagaaacaggatctcactttgtcgcccaggctggagtgcagtggcgtgatcatagcttactacagcctgtaactcctgagctcaagttatcctctcatttcagcctgcctgactacaggcactcactaccacgcccagctacatttttaaaattttctgtagagccaggatctcactaagttgcccaggtcttaaactcctgggcccaagtgacctgcccacttcagcctcccaaaatgctggaattacaggcacgagccactgcatttggccactagtcaaattctttaaagggcatagacaaatcaccaaagaagatatagggagagcacatgaaaagctgtttgaccttataagtcattgaggaaatgcaaatcaaaaccataaggaggcctggcatggtggctcatgcctgtaatcccagcactttgggaggccaaggtgcgtggatcaccgaggtcaggagttcagcctgaccaacatggcgaaacccgcatttctactaaagatacaaaattagccgggtgtggtggcatgtgcctataatcccagctacacaggaagctgaggcagaagaactgcttgcacccaggaggcggaggttgcagtgagccaagatcatgccattgcactccagcctgggcaacagagcgagactctgtctcaaaaacaaacaaacaaacaaaaaccccagaggctatcagatgatacccactgtcagtcaagaggcggagaaattggaagcctcgtgtattgctggtggtatagttactttggaaaacagtctagcggttactcaaaatgttaaaccatagaatcatcatatgactcggcaattctagttgtgggtgtgtgcacaagagaaacggaaacatacgtccacacacaaagacatgcacacaggggcacagcaaaaagtagaaacgactcaagtgtccttcggttgataaatgggtgaacagaatgtgatccacccatacaacagaatgtgactcagccatggaacgtcatggggctctgacccaggccacagcatgggtgagccctaaggacgtcacgctcagcgcgagaagccggacacaaaaggccaaacagggtgtgatcccatttctatgaaatgtccaggacaggcccatccagagacaggaggggatacgtggttgggaggaggaggaaatggggcagtgactgctgatgggaaaagggtttctttttaggggcatgagatgagatagggatagttgcacaatgctgagaaccagcgatgtgtatgctttaaatgcgtgacttgtatggtatgcaaatgagatctcaataaaactgttaaaaaaaaaaaaaaggctgggtgcggtggctcacccctgtaatccccagcactttgggaggccgaggagggtggatcatgaggtcaggacgatcgggaccatcctggctaacatggtgaaaccccatctctactaaaaaaacacaaaaaaattagctgggcatggtggcgggagcctgtagtcctagttacttaggaggctgaggcagg[135 bp omitted]acaaaaagtggaagccaggctgggacagcctggaagaactttctaggcagaagttgtaaaccatccggggagaacatagttgaaatcaggtccttgaaaatttccttggccagagagtgagatgagcacagacagggttcgagaccagcctggccaacatggtgagaccccatctctactaaaaatacaaaaattaggccgggcgcagtgggtcaggcctgtaatcccagcactttggggggccaagacgggtggataacttgaggttaggagttctagaccagcctggcaaacatgacagaaccctgtctctactaaaaatacaaaaaaattagctgggtgtggttgcaggcgcctgtaatcccagctacttgggagactgaggcaggaaaattgcttgaacccaggaggtggaggctgcagtgagtcaagatcacgccactgcactccagcttgggtgacggagtgagactctgtctcaaaaataaataaataaatcaaattagctgggcgtggtggcaggtgcctgtagtctcagctactcgggaggctgaggcaggagaatcgcttgaacccgggaggcagaggttgcagtgagccgagatcatgacattgcactccagccagggtgacagagtgagactctatctcaaaaaaaaaaaaaaaaaaaaaaaaggcacacactgggaggtagggttttgcccagagccctggcagctggaggactctggacttgagcgagggattacgggagagtgcccacgtgagagagataagatctggttttttcatttgaaaagtcattctggctgctgtgcttagcagtcggggaaacaggagacagttttaggcagcaggtggtctagttctgcctcccgaacaatttgcatttatagagatattcaccatatctttatgcatgtcacttttgtagcccttactatgtgcttttgatatgatctcatttcagtttttaaaaaatcgatctgggtccgggcacggtggctcacgcctgtaataccagcactttgggaggccgatgtgggcggatcacctgcggtcaggagtttgagaccagcctggccaacatggcgaaaccccgtgtctactaaaaagtacaaaaattagccgggcgtggtgacgcatgcctgtaatcccatctactggggaggtggagacaggagaaccacttgaacccaggaggcagaggttgcagtgagctgagattgtg[151 bp omitted]cgcgtctctactaaaaatacaaaaaaaattagctgggcctggtggcgggcgcctgtagtcccagatactcgggaggctgaggcaggagaatggcgtgaacctgggaggcagagctggtagtgagctgagattacaccactgcactccagcctgggtgacagagcgagactccatctcaaaaaataaataaataaataaataaataaataattgatctggggtcgggtgtggtggctcatgcctgtaatcccagtgctttggaaggctgaagtgggagtattgcttgacaccaggagctcaagaccagcctgggcaacacagtgagatcctgtctctactaaaaattaaaaaaaaaattagccaggcatcgtggcacacgcctgtgttcccagctacttgggaggctgaggcgagaggattgcctgagcctgcaatggcgaggccacagtgacctgtgatggcatcactgcactccagccagggcaacagagtgagaccctgtctcaaagataaataaacaactatttcaaaaattgatatataatccacacaccctaaaactcgccctttgaagtgtacgattcattggtttttaatacattcacaaggttgggcaaatactaccttcatctaatttcaggacattttctgttttttgagacagaatctccttctgttgcccaggctggagtgcagtggtgcgatctcggctcactgcaaacttcctttgcccctggggagcttaagtgggtggtgggacaggcagcgagacccattagagaacacaagaggccaaggcttgagatagagtggagggggccggagaatactagtcagaagttgctgctaggggccgggctcagtagctcacgcttgtaatcccaacactttgggaggctgggcagggcggatcacttgaggtcaggagttcaagaccagcctggccaacatggtgaaaccctgtctctactaaaaatacaaaaaaattagccaggcgtggtggtgagcgcctgtaatcccagctactagggaggctgaggcaggagaatcactcgaacccaggaggtggaggttgcagtgagccaagatcatgccattgtactccagcctgggtgacagagcaacactccatctcaaaacaaaaaacagaagccatacctatgcatgcccaagaggagaaatcaaggcaggcttcctgaaggaggtgtcattagcttccaaaagcaggtgaggctagggaaatcattcgaagcaggtaggcccatgaagcagaggtgtagagagtggcatcgggactccaagtaccctaggccaccccccagtcccctcatgggtacctctggcttgggcggctccttctcggggccctggagctgcttctggttccagctgagccacatctggtgcagcttctcctggccttccaccagcttctgatcaacgccttgcttgacagtttccatctggggcaggggagagagaagtgagggaaggaggctcccctgggagagacgggattccagaaggaacccaaggaatccttccagcatctgacttacatgacagtctagaaaagagaaagggagggagggaggaagggtttcctggctacggtgagctctggggcctttggtttaatcattgacatactcaggctctgtgtggttggtgcaaagaagggctgcacatcccctgtagctcttcccattgtgtcaatttctcctgcgcttgcaagggagcctggacacgtggctggctttggccaatgggacatgagcagatggaaccagcaaaggcttaaaaagtgcttgtaggctgggcatggtggctcacacctgtaatcccagcactttgggaggttg[134 bp omitted]gaggcacgagaatcgcttgaacctgggaggcggaggttgcagtgagctgagattgcgccactgcactccagcctgggtgacagagccagactctatctcaaaacaacaaaaaacaaaaaacaaaaaaaagtgcttgtaatgaaatatgactcagccttccaaaggaacgaagcaggctgacttctgcaatcccagcgctttgggaggccaagggggttggatcagttgagctcagtagctccagaacagcataggcaacacagtgacatctcatctctacatattac[148 bp omitted]aaaatacaaaaaattagcccagcgtggtggtgggcgcctgtagtcccagctactcgggaggctgaggcaagagaatggtgtgaaccaaggaggcagagcttgcagtgagcagagactgcatgccactgcactccagcctgggtgacagagcgagactccgtctcaaaaaaaaaaaaaaaaaggccgggcgcggtggctcacgcctgtaattccagcactttgggaggccgaggcgggcggatcaagaggtcaggagatcaagaccatcctggctaacactgtgaaaccccatctctactaaaaatagaaaagaaaattagccaggcatggtggccggcgcctgtagtcccagctaccagaaggctgaggcaggagaatggcatgaacccaggaggcggagcttgcagtgagctgagatcgcgccacaaaaagaaaagaaaaataaataaagaggaatgatggcagacatatgctccaagatgggtgcacctaagaggctgcagtgagccatgatcatccactccagcctgggcaacagagtgagcccctgtctctggaaaaaaaaaaaaaaaaatcgtcataaaggtaaatgaagctatccattagggtgggctccaatccataaagggctggtctccttcaataaggagattagagctgtgcgtggtggctcgtgtctgtaatcccagcactttgggaggctgaggtgggtggatcacttgaggtcaggagtttgagaccagcccggccaacatagtgaaaccccatctctactaaaaatacaaaaattagccaggcatggtggcaagtgcctgtgatcccagctactcgggacgtggaggcccaagaatcacttgaacccgggaagtggaggttgcagtgatctgagattgcaccactacactcccgcctgggcaacagagcgagactccgttcaaagaaaaaaaagagattaggacacagacatacacagagggaagggacgaccacgtgaatacacagagagaagatggctgtctacgagtcaaggagagaggccccagaaggacactctgatcttggacttccagcctccagaaatgtgagaaaataaatatctgttgtttacatttcccagacagtacgaattttttttttttttttttgagatggagtctcactcttgtcacccaggctggagagcagtagcatgatctcggctcactgcaatctctgccgcccgggttcaagcgattctcctgcctcagcctcctgagtagctgggattacaggtgcctgccattgtacctggctaatttttgtatttttagtagagatggggtttcaccatgttggccaggctggtcttgaactcctgacctcgtgatccacccgcctcagcctcccaaagtgctgggattacaggcatgagccaccgcacctggccacgattttttttttttttttgagatggggtcttgctctgttgactaggctgcagtgcagtggcacaatcatagctcactgcagcctccaactcctgggctcaagcaatcgtcccacctcagcctcccaagtagctgagattacaggcacgcaccaccacagccagctaattgttttaaattattttttgtagagatggggtcttgctatattgcccaggtgggtctcaaacccctggactcatgcgatcctcctgccttgggctcccaaagcacttgagggactcacacaaagaggtgtgagccactgtgcccggccccagacagtgtggtttgtggcagcatcctgagcaaatgagtgtacaaccagatacagtgccaggagcaagcgggaatggccctgccagcctgcagaggggtgagcaataagccactgagctctgggtgggtgtctgctgcggggtgaaggctgctggctcagggccccgaccccctggaacctcaccaggcttaggacctgcgacagctgcagcagagcctcctgtgccctctgcttggtggctcgaagcttgcccagcgagtgctcataggcgtgctgccgcagcctctccgacagggagcccagacgtacgaagtagctctgttcctgccgctgctgctgcacggacgcgacgtcaaagccatccagggatgtggcgatgcgggctgcaaggaaaaggagaagggtctctgtgaagaccagaacacacagctgggctcgtcccatgcagacagtcccaagaatcacactgtccagtttatttatttatttatttagagatggagtctcgctctgtcgcccaggttggagtgcagtggtgtcatctcggctcactgcaacctctgcctcccgggttcaagtgattatcctgcctc[134 bp omitted]tggcctccaaaagtgctgtgattataggcgtgagccaccacacctggccatgctgtccagtttataacccagttctacttcttataaacctcgaaggcctgggagcaaaggattctgccttggttttccctatctgcaaaacggggataaggaaaattaaacctcacaggaatcagagaccttagactagcaggagggtctcaagctatggcctgcaggccagacctgccttggacaacctgtgaatataggcctgaatgttcattatgcagtcctgcagagaataacagcattccagccagcaatacatcacatatactacagaggtcccataagattataataccgtaggccgggtgcagtggctcatgccagtaatgccagccctttgggaggccaaggcgggcagatcacttgaggtcaggagttcaagactagcctggccaacatggcactaccccatctctactaaaaatacaaaaattagccaggcgtgatggcactagcctgtaatctcagctacttaggaggctgaggcaggagaatcgcttgaacccgggaggtggaggctgcagtgagccaagatcacaccactgcactccagcctgggtgagagtgagactccgtctcaaaaaaaaaagagaataatgacatttcagccaacaatggactgcatatactacagtggtcccataagattataataccatatataccgtatttttcctgtactttttcttcttttttttagacagggtctcggtctgttgcccaggctggagtacagtggcacgacctcagcttactgcaggctcaacctcccagcttcaagctatccttcaaccttggcctcccgagtagctgggactacataaagctgggactacggcaagacacctggctaatttttgtactttttgtaggaatggggtctcactatgttgcccaggctggtcttgaaatcctggactcaagcaatctgctcgcctcagactcccaaagtgctaggtttacaggtgtgagccattgcacctggcttcctgtaccttttctatgtttagatctgtttgttttgtcggtttttatattttgaagtacagtctcgctctgttgcccaggctggagtgcagcggtgcaatcatagctcactgtagccttgaactcccaggctcaagtgatcctcctgtctcagctcccaaatagcaactgggactacaggcgtgcactagcacacccagctaatttttaaattttttgtagagatggggtctatgttgtccaggctggtctggaactactgggcttaactaatcctcccaccaaagtgctgggatgacaggtgtgagccaccacgcctggcctcatcccatgttcgtaggttcatatgtgtatatgcatgtatttatttacttatttatttatttatttatttttttgagacagagtctcactctgttgcccaggctggagtgcaatggcatgatctcggctcactgcaacctccgcctcccgggttcaagtgattctcctgccttagcctcctgagtagctgggattacaggaatgtgccaccatgcttggctaatttttgtatttttagtagagatggggtttcaccatgttggccaggctggtctcaaactcctgaccatgtgatccagctgcctcagcctccgaaagtgctgggattacaggcatgagtcaccacacctggcctttattttttttgagatggagtttcactcttgttgcctgggctggagtgcaatggcgcagtcttggctcaccacaagctctgcctcccagattcaagccattctcttgcctcagcctcccgagttagctgggattacagggatgcgccaccatgcctggctaattttgtatttttagtagagatagggtttctttatgttggtcaggcttgtctcgaactcccgacctcaacctccacccgcctcagcctcccaaagtactgggattacagccatgagccactgcgcccagctgcatgtatttatttaatcctgctcctactgtacccatgcttttttttttttgagatggagtctcactctgtcgcccaggctggagtgcagcggcccaatcttggctcactgcaacctctgcctcccaagtagctgggattacagacgcctgccaccgcacctggctaatgtttattttattattattatttttttgagacggcgtctagctctattgcccaggctggagtggagtggcatgatctcggctcactgcaagctccgcctcccaggttcatgccattctcctgcctcagtctcccgagtagctgggactacaggcacccgccaccacgcccggctaattttttttttttttttttttttttttttagtagagatggggtttcactg[132 bp omitted]ccatgttggccaggcttgtctcaaactcttgacttcaggtgatctgcccacctcggcccaccaaagtgctgggattacaggctgagccaccgcgccctgcctatatcctaagctacttatttgcaaaaatcccaatccccgcactttggggggctaaagcagtaggatcactccagccaaggagttctggatcagctgggatgacagagggagaccccgtctttaccaaaaattaaataaagaaaaattagttgggcgtgatggtgtgtgcttgtagtcccagctactcggaggctgagatgggaggctcgcctcaacccaggagttggaggctgcattgagctatgatcgcaccactgcacttcagcctgggcaagagagtgagactctatctctaaaacaaataaataaaaaagggccgggcatggtggctcacacctgtaatcccagtacttggggaggccgaggtgggcagatcacaaggtcaggagttcgagaccagcctggccaacatagtgaaaccccgtttctactaaaaatacaaaaaattagctgtgtggtggcaggtgcctgtaatcccagctactcaggaggatgaggcaggagactcgcttgaacccaggaggcagaggttgcagtgagctgagatcacgccattgcactccagcctaggtgacagggcgagactctgtctctaaataaataaataaattaattaaagaagaatatcaaataaacagtgcagggagtgcgaatatgtgaccgagatgactggagtgggatgtctggcctggcgggaacaccagcattgttgtcacagttcagtgagatctcaagtttagtcacgtatttatgcaggagcggagtggcgaagggggaagaggaggagggcggggagaggacaggggaggttgtgcaggaccttgtgggctgtgacgaggacttgggctttgaccccaggggaggtggggtccatggagggctgtgggcagagggacgggttctgactcaggtggtcacaggcgccctctggtggctgctgtggggaggagactgtggtggatgagggcgggagctggtgagcaggacagaggggactgcgttagtgatgagattccaagatgcccgggagaagtggcagggacgaggcggcagtgagtgtcggcacagaccccaggaggccgacagcggcttccggtcagggggcctggggaggggtcccagagcagcccgctggccacacttacccagttcggcatccgtaaggggcaggtggttgtccgcccactcctccgacttccccagcaccgtgtcgaccccactcaacaccatctggcccaagcgggagcccatgaccgattggacgccgccggtcactacggactttgtcttgtccacgccgctctgcacagcaccgcgggtcgcgtccaccgcctccgacaattgggtggccaccgtgtccttggcgctagacaccatctcttgggcccccgacaccttagacgacacaagctccttggtgtccgccaggacctaggagatgcaacagcatcagcatctctgccttccctccatatctgggcacccctcccctgcaccccaacttccagggagaccgaggcggggagcgccatcccccgggtgaccccagcatctccgtcttccctctgtatgtgggcacccctcccctgcaccccaacttccagggagactgaggcagggagcgccatcccccaggtgaccctgagtctggagttgtgggcatgacctcatactctgcagccagactacctaggctccgttcctagctagctacttctcagctgtgtggcttcaggaaagtcactctacctccctgtacctcatttctttctttcttttttttttttggagacagggtcttgctctcttgcccaggctggagtgcagtgacaccatctcagatcactgcaacctctgtctcccgggttcaagcagttctcctgcctcagcctccgaagcagctgggattacaggtgcccgccaccatgcctggctaattgttttttgttgttgctgttgttgagatggagtttcactctcgttgcccaggctggagtgcaattgtgtgatctcggctcactgtaacctccgcctcctgggttcaagcgattctcctgcctcagcctcccgagtagctgggattacaggcatgcgccaccacgccaggctaattttgtatttttagtagagatggggtttcaccatgttggtcaggctggtctcaaactcctgacctagtgatccgcccacctcagcctcccaaagtgctaggattacaggcatgagccactgcactctgcctgttttttgtttttttttttcaatttaattttttttcttttgagatggagtctccctctgtcacccaggtggagtgcggtggcacaatctcggctcactacaaactccacctcctgggctcaagtgagcctcccacctcagcttccccagcgagtagctgtgaccacaggcacgtaccaccactcgtggctattttttatcttttatttttatttatttattaatttttttgaggcggagtttcactcttgttgcccaggctagagtgcaatggtgcaatctcgattcactgcaacctctgccacgtgggttcaggtgattctcctgcctcagcctcccaagtagctgggattacaagcacatgccaccatgccgagccgatttttgtatttttagtagagacgggtttcaccatgttggccaggctggtcttgaactcctgacatcaggggatccacttgcctgggcctcccaaagtgctgggattacaagcatgagccactgcgcccagccttattttttattttttgtagagacaaaaaatacaaaaaattagccgggtgcagtggtgcatgtctgtaatccttactactcaagaggctgaggcgggagaatcccttgaacccgggaggtggagtttgcagtgagccgagactgcaccactgcactccaccctgggtgacagagagagactctgtctccaaaaaaaaacaaaaacaaacaaacaaaaaaaagctttgcatggaatcctttgactacgccccacccagcacatggtgagcgctcatctgtcaatacctgctgttctcgaatctaagtcttttttttttttttcttttgagacagggtctcactgtgtcactcaggctggagtgcagtggtgcaatcatagcttactcaagccttgacctcttcggctccagcgatcctcccacctcagcctcccaagtagctgagactacaggtacgcaccaccacacccggcttatttttttattttttgtagagacaaggactctccatgttgcccaggctggtttcgaactcctggcctcaagcagtcctcctgctttggcctcccaaagtgctgggatgaccgacatgagccactgtgtccagctgaagctaagtctttagacagatctctatgcagagggctctccgcaaagttgaaaaccacacctgccccattcctacccaagttggtgcttccctgaagactcagtcctcttgtactcatgagagttcatctttttgtgggggaagagggtgtgagagtcaagttttttgtttttgtttttgtttttttttacagagtttttgctcttgtcacccaggctggagtgcagtggcactatctcggctcaccgcaacctccacctcccaggttcaagcggttctcctgcctc[133 bp omitted]gccccactactcagtgaacacgcacgttctcacactggcccggattaaaatctagctctgacaacaccaccgtcccccagaacctggggaaagttacctcttcacaaagggggaaaaaactcatagggcccagaattgagagagcattgcacctctcaaaaagtcaagagctcacagcaggccaggcacggtggctcacacctgtcatcccggcactttgggaggctgaggtgggaggatcgcttgggcccagaagtgtgagaacagcctgggcaacatagtaagacctcacctctacaaaaaatacaaaaattggccgggcacggtgactcacgcctataatcccagcactttgggaggccaaggcagctggatcacctgaggtcaggagttcgagaccagcctggccaacatggtgaaaccccatctctactaaaaatacaaaaatttgctgggcgtagtgatgggcgcctataatcccagctacttgggaggctgaggcaggaggatcacttgaacccaggaggcagaggttgcagtgggctgagatcacgccactgcattccagcctgggcaacagaacgagactccatctgaaaaaaaaaaaaaaaaaaaaaaaaagctcccagctgctgctctgttcagtgaccttgaagaattcaccctgagcttatcccttctataaacagaaagactgttggcctcctacgctatcagtgggagagaaagggaagcaagggcttggccctgagacgggggctcctggttgacgtttcccatcttcctgtaagctcagcagtttccatcccccctcagccaagcccactattggcctttgctgataaggtgtaggcatggctgggcatagtggctcacaactataatcccagcactttgggaagccaaggcaggcaggaggattgcttgagcccaggagtttgttttttg[147 bp omitted]cccattcctacaaaaaattaaaaaattagtcaggtgtggtggtgcacacctgtagtcccagcttctcaggaggctgagagctgggaggattgcctaagtctaggaggtcaaggctgtagtgagccaagatcacgccactgcactctagcttgggctacagagcaagaccttgtctcaaaaaaaaaaaaaaaatgcaagttgacaaccgctctgctgtttcccagctaaggccatttctgcataaatgggaggtgaggaagtctaaccatgatgggacagcacagctccccggcatacagtaggcactcaatagcaagtggatgaataagctgcctgtccctgcaggtggtctcagggaaagtccaaggatgctgggatgcggctggcttgtcctgcctccaacccagggatcacctatttctgatgctacagacccagacacaagcaggtggtacccgagggtggcccttctgtaaccactgggctgaagcggacatgg[132 bp omitted]gaaaccccatctctactaaaaagataaaattacccaggcatggtggtgcatgcctgtaatcccagctactcgggaggctgaggcaggagaatcgcttgagcccgagaggcggaggttgcagtgagccgagatcgcaccattgcactccagcctgggcaacaagagcaacactctgtctcaaaaaactaaaaaaataagcatctaccctgtgccaggctgcctgctgggcactggacacagccacaaagcaggcagcctgtgccctggtcccagctggggagacaaacaataaccgattaagcctcacacttatctgaaggagggtgtttttttttttttttttgagacagagccttgctctgttgcccaggctggagcgtggtggcacgatctcggctcactgcaacctcttgcctcccaggttcaagtgatactcgtgcctcagcctcccgagtagctgagattataggaactcaccatcacgcctggctgatttttgaatttttagtagacacagggtttcaccatgttggccaggctggtctcgtactcctgatctcaagtgatctgcacgcttcggcctcccaaagtgctgggagtaaggcgtgagccaccacgcctggtctgtgcctcattttttcatcccaggctgttataggttgaattatggccccctcaaccccaaattcttatgttgaagtcctgatccccaggggtaagaatgtggctgtatttagagacagggtctttaaaaagcggtgattaagggaaactgaggtagggcacagtggcacactcctataattctagcactttgtggggctgaggcaggaggattgcttgagcccaagagttggagaccggcctgggcaatatggcgagactccgtcttgacaaaaagtacaaaaattagccaggcgtggtggatgcacctagtcccagctactcaggaggctgaggcaggaggatctgttgagcccaggagtctgagaacagcctgggcaacatggtgaaaactcgtctctacaaaaaattaaaaatagccaggcatggtggtgcatgcctgtggtcccagctacttgggaagctgagatgggaggatcacttgagcccaggagttcaaggctgcagttgagccatgatcacactactgcaccccaccctgggtgacagagtgagaacctgtctcaaaaaaaaaatttttttttttaatgttaagagccaacatttgctacaagccatgtgctgttctgggccttcaggtgttaaccccaggtcagcattgccattctgtagaaaagaaagtgggacccaggctgggcctggtggctcatgtctgtaatcccaacactttgggaggccaaggcaggtggatcacctgaggtcgggagctcgagaccagcctgaccaacatggtaaaaccccatctctactaaaaatacaaaaattggccaggtgtggtggcacatgtctgtaatcccagccactcgggaggctgaggcgggagaatcgcttgaacctgggaggtggaggttgcagtgagctgaaactgcaccagtgcactccagcctgggcaacaagag[211 bp omitted]gaggcaggagaatcgctggaacccggaggtggaggttgcagtgagccgagattgcaccactgcacaccagcctggcaacagagcaagaccccgtctcaaaaaaaaaaaaaaaaaaaaaaaagtgaggcccacagaggcaaagtaacttgtgtgagggccacccagct[141 bp omitted]attctcttgcctcagcctcccgagtaactaggactacaggcacacgccaccacgccaagctaatttttttttttgtagttttagtagagatggggtttcactgtgtttgccaggatggtctcgatctcctgaccttgtgatccgcccacctcagcctcccaaagtactgggattacaggcatgagccaccgcgcctggccagaatatggtgtttttttggtttttttttttttttttgagatggagtttcactcttgctgcccaggctagagtgcaatggcatgatctcggatcactgcaacctccgcctccagggttcaagaaattctcctgcctcagcctcccgagtagctgggattacaggcacccgctaccacacccagataaattttgtatttttagtagagacggggtttctccatgttggtcaggctggtctcaaactcccaacctcaggtgatcctcccgccttggcctcccaaagtgctgggattacaggcatgagccaccgcgcccggccaggaacatggtgttttgatgttttgactttcctgccgccaaccttttctgactaataagttatggaggtggcaacattctgtgtaaagggccacgtaactaagattttcagtactgtgggtcacagtctctgtcacaactactcaaccttgccattgtagggtgaaagcagtcatagacaatatgtaaataaatgggcatggctgtgtgccaataaaactttattataaaaacaagtgggctgggcaccgtggctcattcctataatcccagcactttgagaggctgaggcagctggatcacctgaggtcaggagttcgagaccagcccggccaacatggtgaaaccccatctctactaaaaatacaaaaactagatgggcatggttgcaggcgcctgtaatctggctggctttgcaattattcctccagctaccctgtggggagtggattcggggtggggatgggaaccgacaggagaggcagcagggaggatgccatcaagcttgtctagttaagctgggaccagcgcactccacacccaggtaggtccctgtctcgacagagcccctgaggacggacatcgttaccttctccgtgggctgctgcaggatggggaggttctcctccaacttgtccagccccctgtgggcgtattcgctggctgatgcaactgccaacaacaattaagacgcaaatgtgactgctggaaggtcacctagtaatggttcagggggacaggaccaagagctgggtagacccccctactccccacccagggaaatgaccaggaggggaattcagtgccccctgggacttcacccactctggggctccagcttggagaggatcggctgagccccgctgacagcagccgccgtgagggtcctcactcccttctctgctgcgtcgcagacagtcttgatgtgcgggtagctctccttggtggaggcataggctgcggacaccatgtcgcaggtggagctgatcagaggcatgctggccacacggtccaccacactgggctacaggagagaagtggctcaggcaaactgggtgggggaagatggggagctcagccggaaactcagggtgccctgcagttttgctcttactcctggccagtgaaacggctcagtttacccacactttgcatccaggcagttgcacaagccaggaaccttggggtttcgccacgtgcttcctttatttttattttatttttgaaacggagtcttgcactgttgcccgggctggagtgcactgatgcgatctcagctcactgcaacctccacctcccaggttcaaacgattctcctgcctcatcctcctgagtagctgggattacgggtgccaccacgcccagctaatttttttgtatttttagtagagatggggtttcacca[141 bp omitted]tatcccagcgatgtgccaggtggtgataagggacaacagttccattctcatggcagttagggtctaaaccgggggctgtagaccacagcccatgggtcacagccagcgcaccacttgatttttaaattttaattatttttggggccaggagcagtggctcacgcctgtaatccgagcactttgggagaccgaggcgggtgggtcactttgggtcaggagtttgagactagcctggccaacatggtgaaactccgtctctactaaaaatacaaaaattagccgggcgtggtggcacatgcctgttaccccagctacttgggaggctgaggcaggagaattgcttgaacccaggaggcagaggttgcagtgagccaagatgtcaccactgcactccaggctgggcgacacagcaaggttccatctcaaaaatatatacataaaataaaatcacctgaggatgagagatctggaatagaaactggcctcctaggacgtccctgagagagccttcagaggtgaggatgatttggctcaggggttggggagggcaggtagtttcagacagaaccctgctccctcaggccctccaagggcctttgagattcccccctcccaactggggacaccagtgagtggtccataccccactgaggaataaatccctctggctccgtgagctgccggcagatccctggctccctgccagggcaccctggggtgggaagcctccttgcacgggaatcacagggtcggggcagtccctggtcccggcccttcctcacctgctgtaccggttcttccactgtcacctgggtgctgccatcagcctctgccccgtcggcagacatggtctctgcagcagacgctgaggagagaggaacagtcaggtacagcctgcctggccccaccttccaggagaaagtccaggcccacgctgcagctggaagacagggttcacacctgcccatgacttacagctgtgtctttcagtccttagcaggcacaagagtgacctctggactttgttcaatagcaagtgctgattctaaagcttcgggatggggctcacctggccccctatttctttttttttttctttattttctttggagacagtctcactctgtcgcccaggatggagtgcagtggggcaacctgggctcactgcaacctccgcctcctggtttcaagcaattctcctgcct[134 bp omitted]gcctcccaaagtgctgggattacaggtgtgagccaccacacctgatcctttcttttttttttttctcattaaagacagggtcttgctctgtcacccaggctggagtacagtggtacaatcacagctcactgcagcctctaactcctgggcttaagggatcctcctgcctcagcttcccaagtaactaggactataggcacacaccaccacgcctacttaattttttctttttgggtagagatgttatcttttttttttttttttgagacagagtcttgctctgtcgccaggctggagtgcagtggcacgatctcggctcactgtaacctccacctcccacgttcaagcaattcccctgcctcagccttcccagtagctgggactacaggcgtgtgccactacacctggccaattttttgtatttttttagtagaaacggg[131 bp omitted]gctggtctcgaattcctggtctcaaacaatcctcttgccttggactcccaaagttctgggattacaggagtgagccaccatgcccggccctgaccctgcatttctaaaaggctcccaggcagtgttgatgcagctggtccctgggacacacgtcaggaagcaaggcttgggaacagtcccttcagggctcacctgtactccagcaagccaggtatgacctaaaacctctgtagaggacaatttgccaatagctgtcaagttccaagagccatcttccccttgacccagaaacctcacttcggggaagaacccacacctgtgtttccacatgagcagagctgtgtggacttactggccacaacatgacactggaaacaacct[141 bp omitted]aaaccccgtctctactaaaaatacaaacattagccaggcatgatggtgggcgcctgtaatcccagctactcaggaggctgaggcaggagaatcgcttgaacccaggaggcggaggttgcagtgaggtgagatcgcgccactgcactccagcctgggcaacagagtgagactccgtctcaaaacacaaaaaca[143 bp omitted]atggagaaaccccatctctactaaaaatataaaattagccaggcatggtggcgaatgcctgtaatcccagctattcaggaggctgaggcaggagagttacttgaacccgggaagcggaagttgcagtgagccgagatcgcgccgctgcactccagcctgggcaacaggagcgaaactctgtctcaaaaaaaaaaaaaaaagagatttaaatgtaactcacatgggccagatgtggtgggtcacacctctaatcccagcactttgggaggccgaggcaggaggatcacctgaggtcaggaggtggagaccagcctggccaacatggcaaaaccccgtctctactaaaaatacaaaaattagccaggcgtggtggtgcacgcctccatgtttagttatcccagctactcaggaggctgaggcaggagaatcgcttgaacccaggaggtggaggttgcagtgacctggtattgcaccactgcactccagcctgggtgacagagcgagactccatctcaaaaaaaaaaaaaagaaaacaaaacaaaacaaacaaaagactaaatgtaactgacatgacatgaacaaagatctagtcaagggataaaatgtgttaaatagggcaaactttcttctctttcttgagacggatttccgctctgtcgcccaggctgcagtgtagtggtgcgatcttggctcactgcaacctctgtctcctacgctcaagcaattctcccaccttgaccctgcaagtagctgggactacaggcacgcaccaccacacctggctagtgtgtgtgtgtgtgtgtgtgtgtgtgtgtgtgtgtgtgtgtgtgtgtgtgtggttttgttttttttttttggacagggagtcttgctctgtcatccaggctggggtgcagtggcgtgatttcggctcactgtaacctccgccttctgggttcaagcgattctcctgcctcagcctcctgagtagctgggattacaggtgtgcaccacgtctggctaattttttgtatttttagtagagatggggtttcactatgttggtcaggctggtcttgaacacctgacctcgtgatccacccgcctcagcctcccaaagtgctgggattacaggatgagtcactgcactcagccgtggtttgtttttttttttgttgttgttgttgttttgtttgtttgttttttagtagatggggttttgccatgttgcccaggttggtcttgaactcctgagctcaagggatctgcccaccttggcctcccaaactgctaggattacagctgtgagccaccgcacccagccaaaatttaggctttttttaaaaagtgagataacatgcctgcctgcaccgcagagctatgaagtccaggtcaggggtgtggggaggacggggttccccaggtgagtctatgtaagcgggatgaagccacaactcccttttcctggactagtgaaatgaagctgggacaccatcatcagaagagattctcagggggaagccaggagtcccagctccacctacgctatgctccctggagcaaggcgccttcccctcctctggcctcggtcatcttacctgtaatatgaggctaaagggtcgggcatggtggctcacacctgtaatcccagcacgctgggaggctgaggtgggtggatcatgaggtcaggagttcaagagcagcctggccaacatactgaaacactgtctctactaaaaatacaaaaattaggtgcgggtgtggtggcgggcgcctgtagtcccagctacttgggagactgaggcaggggaattgcttcaacctgggaggcggaggttgcagtaagccaagactgcgccactacactccagcctgggt[133 bp omitted]catggtgaaaccccatctctactaaaaatacaaaaattagccgtgtattttggctgacacctgtagtcccagctacacaggaggctgaggcaggagaattgcttgaacctgggaggtggaggttgcagtgagtcgagatcgcaccactgcactccagcccgggtgacagagggagactccgtttcaaaaaaaaaaaaacatggggctaaaggtcatgcctgtcttatgggctgctttcctggggaattctggtgtgagcctaagaacctgtggccttgagtctgagcatcttttcccagaggaatgaggccccacctcctggtggccttgcttcgatgtcccctaagcagaacccagcaaaatgatgatgttttgcaagcactagatctggagtccagattgggttctttccatttttttttttttgtttttttttttgagacggagtctcgccctgtcgcccacgctggagtgcagtggcgcgatctcagctcactgcaagctctgcctccccggttcacgccattctcctgcctcagcctcccgagtagctgggaccacaggcgcccgccaccacgcctggctaattgtttgtatttttagtagagatgggatttcaccatgttagccaggatcgtctcgatctcctgacctcatgatccgcccgcctcggcctccgaaaatgctgggattacaggcgtgagccaccatgcccggcctttttttttttttgagacagagtcttgctctgtcgcccaggctggaatgcagtggcgtgatctcagttcagtgtaacctccatctcccaggttcaagcgattctcctgcctcagcctccagagtatctgggaatacaggtgcccgccaccacgtccggctaatttttatatttttagtagaggtggggtttcaccatgttggccaggctgttctccaactcctgacctcaaatgatccgcccacctcagcctcccaaagtgctgggattataggcgtgagtcatcctgcccagcccagaatgggttctaatcccagcttggcaactcactaggaataggagtttgggaaggcagcatcccctaggagtcttgcttgccacatctgtgaaatgtgtataagtgtttcacaagagcctggagtccctgtggactggaggagacgctgctccggggaagctcagatccgtgcccggcacatagtaagtgctccataaactatctcaccgcactctggcttccacggacaaaggggtaaagccagccaggaaccagcttcctgctaggtacaaaagtcccccaactgggaagtcaggtgagaagacatacctacctcccagtgatcattgcctaaatctgtgcttctcctcacctcctttggagcctgagctcacctgggcagggggccaggtaggcaggcatcaaactcctggcctcgaccgattctcaagtcccacttaggactcaggcagcttcctcccgtcccctctgtccaccatgacttcctggaactggtttaagcaagggtggccatggcagatgtcaacaccctatgaaacccctgggggtcagtgacctgccttgccgctggctccagaaggggagctccaggccagacccagccatccagcaacttcagagcatgctaagactggacttccaaaattccaagggccccaggtcccactgccaggcctagccgggacaagaaccccaaagcagttaacggataggccttcctacttttaagccacctcgtcgccacgcccacccgagggaagtgggcaggctttgcccaagacctccccagaatcagttgggggcgccaggagctggggcaacccccacccccacccgtggcaaaaccatctgtaggggagggggctttgcggtggcggggggtgtctctgaaaaccccagaagggagggcggagattctgcccgcaggaggaaacttgcctgcaaatggcgtttccaaaagcaaactgttcaaaatttagagaaaacctggtgggcggggggcggtatttagcccacccccttcaatatcaccccttctacggggctctttcgcccctcaaaagtcccaggaagtgagaagagggtttcaaagtctgagcttcgttgcagaagttggatttttctggggggaggggtgaccagcctgggctgaagacccctccccaggccgcagagtccagcaaatcccaccccgagaaaggccctccccgacccctccggcccctggggtgccccaggactccatggacaccgccccccagctcaactgagacgcccccgccactcaccgcggtcaaccggacgtcccaggaacagctgccgcgacttcaaaaccagcttggaaaccgtccgggccgaggcgggggtggcttttactgcgtggtaggttgggggcgcactggagtgacgggcgaggggaccaatcaggttgagggattgcccgcgccaggcccgcccctctcctccctgccccgcctccactaggccccgcccctcgccaagtcatgaagtccgggaaggactccacgccctgcccctgaaggggagggagcactcttggaccacgcctgtcccagccacgggacccccgctccgcagctggggaccctgtgaagttggccctgggaggtgagtgcgatcgggggcgccgcacaggtgctgggattccccaggtcgcccatttcccctatggccaaactgaggctgcgagaaccctgggagagttgcagggtgaccctcgccagcgcgtcaggggccacgccctccaccatgggctccgactcagctatatgtacacacacacacacacacacacacacacactttttttttttttttgagacacagtctcgctctgtcgctaaggctggagtgcagtgacgcgaccttggctcactgcagcctccacctcctggattcaagcgattctcctgcctcagcctcctgagtagctgggattacagacacgtgccaccacgcccggctaattttttgtatttttagcagagacggggtttcaccatgttggtcttgaactcctgacctcaagtgatctgcccgcttgggcctcccaaattgctgggatcacaggtatgagccaccgcacccggcccaacccagctatatgagtgacttgaaccaccacgggaacttgtccagcctccggcctgatctgcccaacatcagaccacttcatcctcccagcactgtattgtctttttaatcatccctattttgcagagaaggaaactgaggcctggagagggtcagccaggggcaatggaggggtcaggctccaggctctgtgactgctggatcaaccttttcctgaagctgcccccacttggattttaccccgcccctctccacctcccaaattatttatcctcttggtctataaaccaaggtctcaatctcagatggtccagggaggaggtgaatatttctgctgaggaggtggcagtgatgccctgcttagaggggcaggggagagcagtgccctatgggagacccacctggagagtcacagatccacaggaagttcaagctgtagacatgtcctgcctgttagggaacaattggaccaaatgaaacccaactggggctttgtccagcccaggggccaccagtttgccacctctgccaaattatttgaatagaatgaagcttctggtagctttagaaagaacatgggaaaaattgggtgtctgtgactgcatttttttgggggggtgagtggggacagggtctatgctagcactgtccaatagaactttctgcaattctagaattgtgtgccatccaacattgtagccaaaagcaccacgtggctaatgcacagtgagaagctgaatgtttaaattttttttttttttttgaggcagagtctcgctctgtctcccaggctggagtgcaatggcgcgatctcgactcactacaacctccacctcccgggttcaagcggttctcctgcctcagcctcccaagtagctgggattacaggcgcgcgccaccacacccagctaatttttgtatttttagtagagacgaggactaaccatattggccaggctggtctcgaactcctggcctcaagtgatccacctgcctcggcctcctaaagtgctgggattacaggtgtgagctaccgcgcttggcctgaatgtttaaatttaagtaacttcaggcagctagtgagattctcaagtgaatctgagaccccattccatgacatttgtaacaggctttttccttctcattcactcattcaaccatatttattgagtccttgcgctggggacagcggtgagctaaacagataagaattccagccctggtgacacacactacccagtgggagagacgaacaaggaacaacataagtgagagaactttacaatgtgtcacgtggtaggacagcaaaggacgagatgaatgtgggggatgcggggattttgttcttgttttttgtcaaagagtctcactctgtcacccaggctggagtgcagtggcacgatctcggctcactgcaacctccgcctcccaggttcaagaaattcttgttcctcgacctcccaagtggctgggattacaggcctgtgccaccatgcctggccaatttttgtattttttttttttttagtagagacggggcttcaccatgttggccaggctggtctcgaactcctgacctcatgtgatccaccagccctggcctctcaaggtgctgggttataggcatgagccaccacacccggtggggccgcagtttttagtagggaggtcagaggaggcctttctgagtgacatccaagaagagaagagagagaggccaggagggaaccatgtccagttagggggaacagcattccaggcagcaggcacagtccgtgcaaaggccctgaggcaggaccacaccctgcctgttagaacagtgaggaggccccagtggctggagtacagtgagtgagagagagggaggaggggagggctgggatggctcagagaggggaagtgactcatccaagattcaaggtcagtgggagatttgcctgttaacccttaacttcttagtggccttgagtaacaaaatagctctggtctaggggatgagccctggtgattttgccccacaccgttttttgttgttttttttttttgagacagagtcatctcccaggcttttggttcttcttgatggcaacatctgcccaggagtccccgcctggcctcccacagccctagggtgagaggtaagaaatagctactgttggctgggcgcagtggctcacgcctataatcccagcactttgggaggccgaggtgggcggatcacctgaggtcgggagtttgagaccagcctgaccaacatggagaaaccccgtccctactaaaaatacaaaattagccaggtgcggtggcgcatgcctgtaatcccagctagtcaggaggctgaggcaggagaatcacttgaacctgggaggcagatgttgcagtgagccagattgtgccattgcactccagcctgggcaacaagagtgaaactctgtttcaaaaaaaaaaaaaaagaaaagaaaagaaaaaaagaaatagctactgttggccggtggctcacaccggtaatcccagcactttgggaagccaaggcggacagatcacttgagctcaggagttcaagaccagcctggccaatatggcaaaatcctgtctctaccaaaaatacaaaattaaccgggtatggtgacgcatgcctgtaatcccagcttctccacaggctgaggtggaaggatcgcttgagactggaggggtggaggttgcagtgagccaagattgcaccactgcactgcagcctgggtagcagagcaagaccctgtctcaaaaccaaaaatgagatagctgctgttttctgggctatttcattacattattcagcagcctgattcccattttcttttattatttatttatttatttattttcgagatggagttctgctctgtcgcccaggctagagtgtagccgtacgatctcggctcactgcaacctctgcctcccggtttccagcaattctctgcctcagcctcccaagtagctgggattacaggagcccaccaccacgcctggctaattttttgaatttttagtagagatggggtttcaccatgttggccaggctgatcttgaactcctgacctcgagatccacccgcctctgcctcccaaagtgttgggattacaggcgtgagccacagcacgtggcgctatttatttatttacttcttcttattattattatttgagtcggagtcttgctctgtcacccaggctggagtgcagtggcgcgatctcagcttactgaaagctccgcctcccgggttcacgccattctcctgcctcagcctcccgagtagctgggactacaggcgcgtgccaccacacccagctaatttttgtatttttagtagagatgaggtttctccatgttgaccaggctgctctcaaactcctgacctaaagtgatccgcccacctcagcctgccaaggtaaaccaactgtgatttctgttttctggatcaggaaactaaggatcagagaggcagagtaacttgccccaggtcacacagccagaaattgccagccccagggtttgaaccttgagttatgtgtctttaaggtctttggtttctgtttgttttggggtttttttgttttgttttgtttttgagagagtctcacttcgtctggaagtgaggctggagtgcagcggtgggatctcagctcactgcaacctccgctttccaggttcaagcaattctcctgcctcagcctcctgagtagctgggattacaggtatgcgccaccacacccggctaatttttgtatttttagtacagacagggttttgccatgtgggccaggctggtctcgaactcctgacctcaggtgatccacccacctctgcctcccaaagtgctgggattacaggcatgagccactgcgcccagcaggtctttgtttttgacattttctactctttctcttctttccttccctctgcatcccctcccaattctaggactcctaattctttctttttttttttttttttttttttttttttttttga[131 bp omitted]caccaagcccggctaattttttgtatttttagtagagacagggtttcaccatgttaaccaggatggtctcaatttcctgacctcctgatccacccgccttggcccctcaaagtgctcggattacaggtgtgagccaccgcgcccagccaggacgcctagttctttctcactgagaagaggggaacggcggtgagcatgctgccacaaggtggcactgctggtcccagatgggtccctgcctggcacaggtgttccctgtctctcctctgacccttccttccctccatccatccatccgtttttaagcatgtcctattgagtgtgagccaggccagcgattcactggatatgcagtcattcaacaaacaataattaagcacctgctgtgtgccaagcctgtgctgggcagccctggagacagacaca[131 bp omitted]agaaaccctgtctctattaaaaatacaaaattagccaggcatggtggcgcatgcctgtaatcccagctagttgggaggctgaggcaggagaatcgcttgaacccgggatggtgaggtgagaattgcttgaatcctctctgagccatccctgtcctcccctcctccctccctctcgctcactctttgcactccagcctgagcgacaaaaacgaaactctgtctcaaaaaaaaaaaaaaagacttttgcggccaggcacggtggctcagctctttgggaggttgaggccagaggatcactggaggccaggagttcgagaccagccaggccacatagcaagaccccgtctctgcacaaacttaaaaaatgtagccaggcatgatggtgcctgcctggggcatcggctacttcgaaggttgaggagggaggattgcttgagcccaagagttctagtctgcagtgagctgtgatagcaccactgcactccagtctgggcgacagagcaagaccctgactcaaaacaaaaaacaaacaaacaaaggcttttggggctgggcacagtggctcatgcctataattcccagaagattgggagtctgaggcagaagaattacttgaagccaggaggttctgttttgttttgttttcttttcttttgagatggagtgtgaccaggtggataaaatagagggttatcagggctgtgatagggtgcacaagtgtgatggagcctggggtaggtgctggacctaggtgggtgagagtagttctggaggactttcaggatgaggtgatgtctaagctgagccctgagaagtgaacagcgatcaggcaggtaaaggcaccaaaaagctgtttcaggccaagggaacagagagtgctaagacacagaataagactggagcgtagaatgtggtgggggtggcatcaggggaaaaaagatgaagctggacagagtggccagggtcaggctgccagatctaagggcactggggagccacagtaggttccagagcaggagcagcaagggcaagttggaacatttgaaagatctcttgggccaccctgtggataatgattcaaagggaataagactggaggatgaggaatgggaggaggaaaggaaccaaatgcttcaggtaactctggaagaaaaagtaggacatacgtggtggcaaggccagatatggtggctcacgcctgcaatcccagcactttgagaggcggaggtgggaggatcgcttgagcccaggagttcgagaccaacctgggcaacatagtgagaccctgtctctgttttgtttgttcgttttagagaaagaaaataaaaagaaaggtggtattggagagggaacagtacagaaggacgttccagtcacagtagcattcattcattcattcggggaatatttatttttatttttatttatttatttttttgagacggagtctcactctgtcacccatgctggagttggagtgcagtggtgcgatctcggctcactgcaagctccgcctcctgggttcacgccattctcctgcctcagcctccagagtagctgggactacaggcgcccaccaccatgcccagctaattttttttttttttttttaatagagacggggtttcaccgtgttagccaggatggtctcaatctcctgacctcatgatccgcccgccttggcctcccaaagtgctgggattacaggcatgatccaccacgcctggcctatttttattattattattatttattacttttttttttgagatggagtctcgctctgtcgcccaagctggagtgcagtggcgcgatctcagctcactgcaacctccgcctcccgggttcaagggattctcctgcctc[212 bp omitted]aagtctagctctgtcacccaggctggagtacaatggcacgatcttgggtcactgtagcccccgcctcctgggttcaagggattctcctgcctcggcctgctgagcagctggcgttacaggtgcatgtgaccatgcccggctaatttttatattttaaattttttttaagttttgtttatttatttatttgagattgagtctcattccatcacctgagctggagtgcagtggcgctatctcagctcactgcaaccttcacctcctggtttcaaacgattctcctgcctt[134 bp omitted]cggcctcccacagtgctgggattacaggcatgagccaccgcgcctggccagggcctggtctttatcttgggagcaatgggcagcaatgttggattcagagcaggggagggccctcatcaggcctctggggaagggaaggggcctgtgagatgcagggactggcaggggcctgggggctctgggagggccagtgggaggtgacggtccgcagagggtctgcagggggtgcgggcagaggagagagagactgtagacggaaagtggacaggtgaggctgacacaggcctcgggttgggggttccgggggcagggccaaccttgaggcagggacccagcagagaagcacgttgggggatatggatgaggatgagctcagcttgcctcttccagaacccctggcgtaaggttgcagggttagcaaataaaaatacaggacacctggttaaatgca[180 bp omitted]t[131 bp omitted]cactgcgcccggcctttgtttttcttttgagacagggtcttgctctgctgctcaggctggagtgcagtggtacaatcagggctcactgcagcctcgacatcctggacctaagcgatcctcttacctcagcctcccaagtagctgggagtacaggtgcatgccaccacatcgggctaatttttgtatttttcatacaggtgggggtcccaccatgttgcccaggctggtcttaaactcctgggctcaagtaatcctcccaccttggcctcccaaagtgctgggattactagtgtgagccaccacgcctggccatgtgaataatttttagcgtaagtatgttccaaattattttgagacatacttatgctaaacatttttcatttaatggagttcagtggctcacgcctataatcccggtgctttcggagacagaggcaggaagattgcttgagcccaggaggtcagggctgccgtgaactatgatggcaccactgtactccagcctgggtgacagagcaagaccttgtctcaaaataataataataataataataattcattttggccgggcacagtggctcacacctgtaatctcagcattttgggaggctg[134 bp omitted]gaggcaggagaatcccttgaacctgggaggcagaggttcctgtcagccaagatcgcaccaccgcactccagcctgggtgacagagggagaatctgtctcaaaaaataataataatggccgggtgcgacggctcacacctgtcatcccagtactttgggaggccgaggg[135 bp omitted]gaggcaggagactcacttgaacccaggaggcggaggttgcagtgagccaagatcacgccattgcactccatcctgggcaacaaaagcaaaactccgtctcaaaataaaaacaaaaacaaatactaataataacaacaacaataattcgtttaactgcctgtcttgtaattaacctggcaactcagccagacgttgtccacgttgccccccgccacattgtggctccagcgaccgggtggacacctgaccagctgtggcccaacggtgagaaggcagaggattttgtctggcaattatttgggctcgctgcaggaagccaggggtcttttaacatgcaggccctggcctgtccccacccccaggccctcatggcgccagctgcccgctgccccctgcaaggcgctggcgggcgtgggggaggggagcagctctgagacccactgtcccctctcctaggccaggagtgtcctactggctcgcatgcccatccgtggaatgcccgaggggaccccgggccaggcctccacctggccattgtctcctgcaccctccgtccctggtggcccgtccggctctgagccagacatttacgacttcttgggcctcccacaagtcctgcaggcaggcagattccttgtccatgtccgggaaggatggaggcctggggcagctgcctgggaatccgatcccacgggcccctgcaactccattccttggggccgcagccacccccacagccaatccctccctggagaaccgtgtccaggatggccaggcctggcggctctgggcacggccctcccagtgccagctgccaggatgtgccagccgcattggcggggagagaacaggccgttcttggctctcccggctgcctctttgttccctgggcggaggtggggggctgttgtcctggcaaccacccccttttccccaacacagtcacacgaggtgaaaactgggggcgcctcaggcctgggggttcaggtcagggagggtccccggtcacctaaggtggccgaggatctccctcctccccgccagcccggcttccttggagttcatatttcccggacgacgagggaggccgggtcaccccccgcacttttggggattggaatgtcggaggtggtggcaacagggggtggacgttcccagcggggcaggcaccgtggtggtggcagctgctagtcccctgcctgtcccacgtcccccaagtgggaggccgcagctggtgtgggtgactttggttcccggggcgggggagggttattttgggagtagggaccagggagaatgagaggcccctccacgggggcaggaagtggggcggccccagctgcattctcccgttggcccacctggcgtggcgggtactgctgccgctgcacaggaagtgtccccaacgcccgcctgtgtggtccactgagtctagggcctggaaatgggaggcagctggcaaggagggggcagggacccgctgggggtgctgtacagcagatcagaatcttccagaagagtcccgctggggtaatggtggtgcctatggagtgagtggtgactttggttcaggccatttatatgcattggctggtttaatccagtgtgttccggaggaagatgctaggaataaatcccccttttacacatggggaaactgaggctcagaaacagaagcgactggcccaaagtcattcagcaaataaacagccgaggccaggcgcggtggctcagacgcctgtaatcccagcacttcaggaggccaaggcgggtgaatcacctgaggtcaggagtgtgagaccagcctggaccacacggtgaaaccctgtctctactaaaaatataaaaatcagccaggtgtggtggcgggtgcctgtaatcccagcacttcaggaggctgaggccggtgaatcacctgaggtcaggggtgtgagaccagcctggacaacacggtgaaaccatgtatctactaaaaatacaaaaatcagccaggtgtggtggcgggtgcctgtaatcccagctacttgggaggccgaggcatgagaattgcttgaacccagggcaggggtggaggttgcggtgagccaagatggcgccactgcattccagccttggcaagacagcaagactctgtcccaaaacaacaacaataacaacaacaacaccaacaacaaaacagcagaggccgggcgccatggctcatgcttataatcccagcactttgggaagctgaggtgggcagatcgtttgagcccaggagcttgaggttgcagtgagctatgatcgcgccactgcactccagcctgagactggagcgtgactccaactcaaaacaaaataataataataataataattaataaacatcagaagtgggattctcatgcatagcatttactatcagatatattaactccacagaggcctccaagtatatactgtacagtgtagctctcaaccaggggtgagtctgtccttcagggcccatggggtgatgtctggggacatttgtggttgtcatgactgggggttgctcctgatatggagggggtgggggccggggatgctgctcagcactcttcagtaccc[145 bp omitted]gaaaccctgtctctactaaaaatataaaaattagccagccgtggtggcacgcgcctgtaatcccagccactcaggagaccgagccaggagaatcgcttgaacctgggagatggaggttgcagtgagccgagatcacacaactgcactccacccttgtcgacagagtgagactctgtctcaaaaatacatacatactatacatacatacatacatacatacatacatacatacatacatacatttcccatcctggggtcgttcatatcagcctaactgtcagagtttaggcaagcagtgagtattcacagtggttcacatcaccggtttggttgaactggttttgagtcctggctctgcagtgagtttgctgtgtgaccttgggcaaatcaatgaacctctctgatcctcagttcctgggcattggtagtggtatcttcctcagggttgctgtctggactacatgagatgatgcaggtaactggcttaagacagtgtcatgctcaaagtgagggcccaagaaatgtgacctagatcactattgttactattcaagccacaaacatttcttcctttttttttttttgagacagagtctcgctttgttgcccaagccggagtgcagaacctctgcctcctgggttcaagccattctcctgcctcagcctcccaagtagctgggattacagacatgtaccaccacacctggctaatttttgtttttgtttttgtttttcaatgtttccagtttctttttttttttattattatactttaaattctagggtacatgtgcacaacgtgcaggtttgttacatatgtatacatgtgccatgttggtgtgctgcacccattaactcgtcatttacattaggtatacctcctaatgctatccctcccccctcccctcaccccacgacaggcccgggtgtgtgatgttcctcttcctgtgtccacgtgttctcattgttcaattcccacctataatttttgtatttttagtagaaacggggtttcaccatgtt[134 bp omitted]ctcacacctgtaatcccagcactttgggaggccaagatgggagcatcacttgaggtcaggagttcaaaaccagcctggacaacacagtgagacccccatctctatttgaaaaaaataaaataaaaaataaaataaaattacatttgtggctctcatgatcactagcattggcttagaggaagaaatagacatgaattgactgaatgtggtggctcttgtctgtaatcacaacagtttgggaggctgaggcaggaggattgcttgatcccatgagttcaagactagcctgggcaacatcgaaagaccacatctctacaagaaacttttctttttttttttgagatggagtctcgctctgtcacccaggctggcatgcagtggcacgatgtcggctcactgcaacctccgcctcccaggttcaagcaattctcctgcctcagcctcccgagtagctgggactacaggtacccaccaccatgcccggctaattttttgtatttttaggagagacgggatttcaccatattggcca[133 bp omitted]tacgcctgtaatcccagcactttgggaggcagaggcggagggattatgaggtcaggagttcgagaccagcctggccaatatggtgaaaccccgtctctacaaaagatacaaaaattagccaggcgtggtggtgggtgcctgtaatcccagctactcaggaggctgaggcaggagaatcacttgaactggggaggcagaggttgcagtgagccaagagcgagccactgcattccaccctgggtgacagagcgagactctgtctcaaaacaaaaaaaaagagagagagagagacatgaatccggtggggcgcaatggcttatgcctgtaatcacagcactttgggaggccgaggtgagcagatcacttgaagtcagaaggttgagaccagcctggccaacatggcgaaaccctgtctctactgaaaatacaaaaattaggcgggcatggtggcatccacctgtaatcccagctactcagaagactgaggcaggagaatcacttgaacccgggaggcggaggttgcagtgagccgagattgcggcactgcactctagcctgggtaacagagcgaaactccatctcaaaaaaaaacaaaaatgcaattgtggctggcggcagtggctcacacctgtaatcccagcactttgggaggctgaagcgggcggatcacttgaggtcaggagtttgagaccagcctggctaatgtggtgaaacgccgtctctaccaaaaaatacaaaaattagccaggcaaggtggcttgcacctgtaatcctagctactagctactagggaggctgaggtgtgaggactggattgcttgaacctggggggcggaggttacagtgagccaagatcgtgccactctactccagcctggtcaacagagtgagaccctgtctcaaaaaaaaaaaaaaaggcaattgttattaaacttcgagatcttgaaaaaagaaaaaagaacaaaatgcaattgtcattacagcagtctgttttctttttgttttctttatctttttttttttttgagacggagtctcactctgttgcccaggctggagggcagtggtgtgatctcagctcactgcaagctccgcctcccgggttcactccattctcctgcctc[131 bp omitted]ccttggcctcccaaagtgccgagattacaggcatgagccaccgcgcccggccagcagtcttttttttctgtttctttcttttttttttttttttttttgagacggagtctcgctttgttgcccaggctggagtgcagtggcgtgatctcggctcaccgcaagctcc[135 bp omitted]gcctcccaaagtgctgagattacaggtgtgagccaccgcacctggcccagcagtctcttttttcaaaatccctctgtgggtgtcacctggccccaggcttgcttcagcgacactagtctactttcagttccatgctcctgtcatgttcccttatatgccaggcctttgcacaggctgttccctctgcctggcacactcttccctgttttctgcctagccaactgtgcgaatccttcagatctcatttcaagcactgcttccttaggaaagctttcgtggagctccgataacgagccgctatgcatctgtccaatggggaacgtggcagagaagccttttgacactttattggtagaatttgtcgattcatgtctatttctttttttttgagacggagtttcactcttgttgcccaggctggagtgcagtgacacgatcttggctcactgcaatctccgcttcccgggttcaagcgattctcctgcctcagcctcccgagtagctgggattacagggcctgccacgacgccctgctaattttttgtatttttagtaggcacggggtttcaccatgttggccagactggtctccaactcctgacctcaggtgatccgctggtctcagcctcccaaagtgctgagattacaggcgtgagccaccgcccccggcatttttttttcttttttttttttgagacagtctctgtcaccctgactggagtgcagtggtgtgatttcagctcactgcaacctttggctactgggtttaagggattctcgtgcctcagcctcctgagtagctgggattacaggcacctgccaccacgcccagctaatttttgcatttttagtagagatggggtttcaccatgttggcgaggctggtctcacactcctgacctcaagtgatccgatcgcttcggcctcccaaagtgctgggcaacagatcgagatcctgtctgcaagaaaacagtacaacacaaaaaaactaagtgtcttggctgggtgcggtggctcacacctgtaatcccagcactctgggaggccgaggcctgcagaccatgtgaggtcgggagtttgagaccagcctgaccaacatggagaaaccccgtttctactaaaaatacaaaattagcctggtgtggtggtgcatgcctgtaatcccagctactcgcaaggctgaggcaggagaattgcttgaacccaggaggcagaggttctggtgagccgagatcatgccattgcactccaacctgggcaacaagagtgaaactccttctcaaaaacaaaaacaaaaaagactaggcgtggtggctcatgcctgtaatcccaacactttgggaggctaaggcaggtggatcacaaggtcaggagattgggaccatcctggccaacatggtgaaaccctgtctctactgaaaatacaaaaattagctgggtgtggtggcaggtgcctgtgatcccaactactagggaggctgaggtaggagaatcgcttgaacccgggaggcggaggttgcagtgagtcgagattttactactgcactccagcctggcaacacagcaagactctgtcttaaataaataaatcaataaagtgtcttagttggtcccaccctatggagaggctgggttttccggaatctgctggaatgtggcaggggccactaaatgcaaatgtgtcatggctgcagggttgacagacaccctgcagcaagagggagggaggtaccagtatgttgcagttcgaaggtggctggagaagtatttcagggccattcccccaagaagacaaaccctggaccagtctttttaaaatttaatttaatttaat[211 bp omitted]gaggcaggagaatcgcttgaacccgggaggcggaggttgcagtgagccgacattgcactactgcactccagcctggcaacacagcaagactctgtcttaaataaataaatcaataaagtgtcttagttggtcccaccctatggagaggctgggttttccggaatctgctggaatgtggcaggggtcactaaatgcaaatgtgtcatggctgcagggttgacagacaccctgcagcaagagggagggaggtaccagtatgttgcagttcgaaggtggctggagaagtatttcagggccattcccccaagaagacaaaccctggatcagtctttttaaaatttaatttaatt[214 bp omitted]gaggcaggagaatggtgtgaaaccgggaggcggagcttgcagtgagccgagatcccgccactgcactccagcctgtacgacagagcaagactccgtctcaaaaaaaaaagacaaagaaaaattaaaaactagacacagggtctccctatgttggccaggctggtctcaaactcctaacctcaaagacatctgcccaccttggcctcccaaagtgctgggattacagacacgagccacagcgcccagcctcagccgctgtttcatttcagccatgcagggccttgcaggcaaagccaggccttttggattttacttcaaatgctgtagggacctgatggagattttcagtgagggaacaggatggcctttttcatgctgagagttcttttgttgctccaggaatacaattgacaggtaaaattcaggatgcccaattaaatcagaattgcagataaacaatacattttttttgagacagagttttgtgcactgtctctctctctctctctctctctctctctctctctctctatatatatatatatttttttttttttttgagacagagttttgctcttgtcatctaggctggagtgcagtggtgcgaccttggctcactgcaatctccgcctcccgggttcaagcaattctcctgcctcagcctcccgagtagctgggattacaggcgcccgccaccatgccctgataattttttgtatttttagtaggcatggtgtttcaccatgttggccagactggtctccaactcctgacctcaggtgatccactcgtctcagcctcccaaagtgctgggactacaggcgtgagccaccgcccccggcatttttttttttttttaagacagagtctcactctattgcccaagctggagtgcagtggcgtgatctcagctcactgcaaccttcacctcccgagttcaagcgattctcctgcctcagcctcctgagtagctgggattacaggcatacgccaccacgcccagctaatttttgtatttttagtagagacagggtttcgccatgttggccaggctggtctcacactcctgacctcaagtgatccgcccacctcggcctcccaaagtgctgggcggcagatcgagatcctgtt[133 bp omitted]cctgaccaacatggagaaaccccatttctactaaaagtacaaaattagctaggtgtggtggcacatgcctttaataccagctacttgggaggctgaggcagcagaattgcttcaactgaggaggcggaggttgtggtgagccgagatcacgccattgcactccagcctgggcaacaagagcgaaattccatctcaaaaaaaaaaaaaaaaaaggtccgggcgcagtcgctcgtgcctgtaatcccagcactttgggagcctgaggcaggcagatcacgaggtcaggagattgagaccatcctggccaacatggtgaaaccctgtctctactgaaaatacaaaaattagctgggtgtggtggcaggtgcctgtgatcccaactactagggaggctgaggcaggagaatcgcttgaacccgggaggcggaggttgcagtgagccgagattttactactgcactccagcctggcaacacagcaagactctgtcttaaataaataaatcaacaacgtgtcttagttggtcccaccctatggagaggctgggttttccggaatctgctggaatgtggcaggggccactaaatgcaaatgtgtcatggctgcagggttgacagacaccctgcagcaagggggagggaggtaccagtatgttgcagttccaaggtggctggagaagtatttcagggccattcccccaagaagacaaaccctggatcagtctttttaaaatttaatttaatttaat[150 bp omitted]aaatacaaaaaaaattagccaggcgtggtggcaggcgcctgtagtcccaactactcaggaggctgaggcaggagaatgtcatgaacccgggagacagagcttgcattgagccaagattgcgccactgcactctagcctgggcgacagagtgagactccgtctcaaaaaaaaaaaaaagaaaaaagaaagaaaaattaaaaaatagacacagggtctccctatgttggccaggctggtctcaaactcctaacctcaagacatctgcccatcttggcctcccaaagtgctgggattacaggcacaagccgccgtgcccagcctcagccgctgtttcctttcagccatgcagggccttgcaggcgaagccaggacttttggattttacttcaaatgctgtagggacctgatggaggaacgggatggcctgtttggtgttgagagtcctcttgttgctccaggaatacaattgccagggaaaatccaggatgcccaattaaatcagaattgcagataaacaatacattttttttgagatggagttttgcatgctttctctctctctccctatatatgtatacatatatatttttttgagacggagttttcttcttgtcacctaggctggagtgcagtggtgcgatcttggctcactgcaacctctgcctaccaggttcaagcgattctcctgccttagcctcccgagtagctgggattacaggtgcccgccaccatgcccggctaatttttgtattttttgtagagatgggttttctccatgttggccaggaaggtctcgacctcctgacctcaagtgatctacctgcctcagcctcccgaagtgctgggattacagatgtgagccactgcgcctggccatcaatgaatgatttttaagcataagtatatcccaaatattgcatgggatatacttatactaaatatttctatctttcctctaaaatccaatttaggtcgggcacggtgtcccaggaggctgaggcaggagaatcgcttgaatccaggaggtggaggctgcagtgagccaagatcaaaccactgcactccagcctgggagacagagggagactccgtctcagaaacaacacaaaaccaaaaaaggtggacagagaagggtagaggcaggggacggggagaagtgggagattctgggcagtgtggagaccgagcccctctggcttattgatggattgcacatgggcagatggcacaggctcatcactaggaagactttggcattgatcctaagtgcgggggaggaagccgaagctgctgtaagcagaggagacacaggatctgactcaggtatgagacccacaaagcagccctggggctcaatagcaacctctgtgaattacaccagcacacagtttctccccctgtgtactgtgatattgtgggtggcttttttttttatttttatttttttgagacagtgtcttgctctatcacccaggccggagtgcagtagcacgatcatggctcacttcagcctcgatctcccagactcaagtgatcctccagcctcagcctccctaatagctgggactaaaggtgtttgctgctacagccagctaatttttcatatatatatatatacatatatatatttagactgactcttgcactgtcacccaggctggagtgcagtgaggtgatctcagctcactgcaacctcagcctcccaggttcaagagattctcctgcctcagactcccgagtagctgggattacaggtgcacaccatcacgcctggataatttttctttttttttttttttttgagacggagtcttgcactatcacccagtctggagtgcagtggcacgatctcggttcactgcaagctccacctcccaggttcgcgccattctcctgcctcagcctcccaagtagctgggactacaggcatccaccaccatgcctggctaattttgttttcgtatttttagtagagatggggtttcaccgtgttagccaggatggtcttgcctgacctcgtgatccgcctgccttggccccccaaagtgctgggctgggtgtgagtcaccgtgcccggccagtttttctttttctcttttttttttttttgtagagatgggggtctcacagtgttgcccaggcttgtctcaaactcctggtctcaagtgatcctccagccatggcctcctaaagtcctgggattacaggaatgagccaccatgctcagcccccttggtactgttgacattcaggataaacaattcctgattgtgggggccgtcctggacactgcagggtgctgaacagcgtccctggcctccaccctctccacgccaataagactcttctcccccgatcccctgcagttgtgacagccaatacaaccagacattagcagaggggagaattctccccaagtaggacccctggtcttggcactgtgagaccccagtaggctggggcagactcagggtggaaaaggcaggttatgccgggtttgggtcctgggagaccttcccggtttcctttgtccattccaggcattcagtgatagttctagggaggggagacacagatacctaaaccgctagagcttggggaggttgcagacaacctgttgcccactcctcgactcctctgagagtcacctgtgcaagagagagggcttcctcctggtagagactaataaagcttttaatatttaaaagttcgggcacttaattctggtgatctgggttcacgggtaacactccgtcctctgacagctggcagatggcagagtccactgaggcgctggtgatgatgatgggaactttggccttgaggctggtcagggaccagggcaggtgcacggtggtgaccagctcgtagcgagtgtgcatgatctcaccgtcctgcgtgctgctgctcacggacagcagcaacggcaggttgaaggtgctgacaaccttggtggtgttgaagcgggtcacgggggtgttggcctcctgcctcagaagctcgctgctgtccagccgagaccgccgctctgcactgggcgtgaagccctcgtactgtatgtgggcatacagggcgaatacgaccgtcttgatgcatttgctggtctggttgttgatctctgttgtgaagacgaccttctctcctggcgtgaaggtgttcctttccatctggatttgcaaacagacagtgccctggcggcagcagttgtaggagactttctcctcagcctccacgaacaaggggttctaggaggatgtgggggaacagacaaccgtgagggaccaggaccacaaaatccacttgcctgcctgatccaccctgggaactcctcaaagtctgtggggctggctgggcacgatagctcacgcctataatcccaacaccttgggaggccgaggcgggaggatcaccatgtcaggagttcgagaccagcctggccaacatggcgaaactccatctatactaaaaatacaaaaattagctgagcgtgatggagcatccctgtaatcccagctactcaggaggctgaggcaggagaatctcttgaacccgggaggtggaggttgcagtgagccgagattgtgtgattgcacttcagccagggctacagagcaaaactccgtctcaaaaaaaaaaaaaagtctctggggctttgggggctctcctaggaagaggcattaagatggaatctggaagcctagggattttgcagtcaaaaacctggagtcatctcccatctcccagcatgttttgttttttgttttttgtatttttttggagacagagtcttgctctgttgcccaggctggagtggagtggcgtgatctcggctcagtgcaacctccgcctcccgggttcaagcgattcttctgcctcagcctcctgagtagctgggattacaggcgcacgccaccacacccagctaattttttgtgtatttttagtagagacagggtttcactatgttggccagacttgtcttgaactcctgaccttgtgatccgcctgcctcggcctaccaaagtgctgggattacaggcatgagccactgcatccagcattttttttttttttaatgcagcctggagtgcagtggtgcactcatggctcactgcagacttgacctcctggactcaagtgatcctcctccatcagcctcccaagtagcagggaccacaggcatgtgtgccaccacaccccagctttttttttttgaaagaaggtctcactatgttgtccaggctagtctcaaactcctgggctcaagcagtcctcccacctcagcctcccaaagtgctgggattacaggcatgagccactgtgcccagcctgcttttatttttaaaaagttgtttgcaacatagcaaattgttatttctgatatttttattctacttgttgcctgttctgttcttttatcttaatataaaaaagtggttgcaacctgctaaattgattttttgtgatattgcctatttagattcttgcctattctttcattttataaaaatatggccaggcgctcccagcatttcaggagg[134 bp omitted]gaggcgggagaattgctggaatctgggaggtggaggttgaagttagctgagatcgcgccactgcactccagtctggcgaaagagcaagactccgtctcaaaaataaatatatatattataataatataatatatattatattattagaatatatataatatattattatatataatatattataataatataacatattatatatatattatatatatatagccaggcgcagtggctcacacctgtaatcccagcactttggggggccgaggcaggaggatcacctgaggtcaggaatttgagaccagcctggccagcgtggtgaaaccccatctctactaaaaatacaaaagttggccgggtgtgatggcacgcaactgtaatcccagctactcaggaggctgaggcaggagaatcacttgaacctgggagactgaggttgcagtgaggctgagatccagccctgcactccagcctgagcaacagagtgagactctgtctcaaaaaaaaaaagaaaagaaaagaaaagaaaatgcttgtattccaccaaatggatttttgcaacccacgactgggttgtgacctgtgatttgaaaaacattgctggctgggcatggtggctcatgcctgtaatcccagcactttggggaggccaaggggggaggatcactggagcccagaagttcaagaccagcctgggcaacatagtgagaccctgtctccaaaaa[131 bp omitted]aaaccccatctctactaaaaatacaaaaaaaaaaaaatagccaggcgtggtggtgggcacctgtagtcccagctacttgggaggctgaggcaggagaatggcgtgaacccaggaggcagaggttacagtgagccgagatagcgccactacactccagcctgggcgacagagcaagactctgcctaaa[362 bp omitted]gaggc[138 bp omitted]gtgcctgtagtcccagctactcgggaggctgaggcaggagaatggcatgaacctgggaggcagagcttgcagtgagccgagatcgcgccactgccctccagcctgggcgacagaatgagactgtctcaaaaaaaaaaaaaagaagaagaaggagaaggagaaggagaagaagaagaagaggaagaggaagaggaagaggaagaagaagaagaagaagaaaatcatactgcaggaagtcaggtatgtttcctttttgagaactcaggcagacccttgaccccctctgacctcacctcccacttttctgcctctggcttctcttcagccttttcaggagcagctggagctccccctcctctcctgaaggttaattgaatctggttacattgtaaatccctgcagtcttattcgaaaattcgtagcatgcgttaggaccctgcaggtgtgaaagaacctgctgccctaactccagacaaagctggtatttctgtcctggtcctgaaggaggtatcaggaggtgccaagagctaccaatgtcccttatttccaaatgagctattacattttttttttaatagcggtaccggctaggagcggtggctaacgcctgtaatcccagcactttgggaggcctaggcaggcggatcacctgaagtcaggagtttaagaccagcctggccaacatgtggaaactccgtctttactaaaaaatacaaaaattagctgggcgtggtggtgggtacttctcatcccagctactcgggaggatgaggcaggagagtcacttgaagctgggaggcagaggttgtattgagccaagattgcgccactgcactcccgcctgggtgacaaagtgagactccgtctcaaaaaaaaaaaaaaaaaaaaaaaaagaaagaaagaaaaaggaaaaaaaatgccagccctctgacatttgtcgtcctgtcccaatgctctgatgacaaatgactccctggagatgtgaagtgactttggccaacgtccctcctcccacctcgacttccgcctctgcacctggactcgggaagggatccagaacgagtccttcactcagccaagcggaggctgcactgcccgtccttctcctggactgaggccaccacctctattgtctgggagctccaaggtcagtgctggagggccactgagtgtacatgcctctctcccaccctgagggtcaccctgtggggccttttcttggcttttccccagggtcgtgtctccctcttgacaagtggacatttgggccattctcctgggtggggccgtcctgggcactgcagggtgctgagcagcgcccctggcctccacccactccatgccaggagcaccccccaagttgagacaaccacagatgtctccagacattgccaaatgtcccttatggggataaaacagccacagttgaaaaccactg[138 bp omitted]atggcgaaaccctgtctctactaaaaatacaaaaattagctgggcatggtggtgcacatctgtaatcccagttactcaggaggctgaggcaggagaatcgcttgaacctgggaggcggaggttacagtgagccgagatcatgcctctgcacttcagcctggtgacagagcgagactgcatctcaaaaaaaaaaaaaaaaatatatatatatatatatatttttttttttttacacacacacacacacacacacacacacacacacacacacacacatatatataattttattttagagacagggtctcactctgtcgcccaggctggagtgcagtggtgcaaacatggcttactgcagccttgacctccagctgccctaaggtttctgactcaccttttgtgaaatctcggggcctgggaagctgccaacacccttcccttctccccatgggaccttctctgtcccctgcctgcccaccttccctcttcctccttggagcttggagattgttcccacctccacctttcccccatcggtacctggaatggggtttctttgtggaaggtggaagttccttgaaccaataagtacatcctcttcttggctaaaatgtgttccctgcccatgcaggaagcttgtacgaaatagaagacatggccaaatttgctggtgaaggtagaaggaagcctgggaggtaagttgaaatggaagtcaaaggtgtggctgcctgcacttaaccaattatctgaaagcaaaacacaccgatgccatcagaaggttctagaatcttttttccttcttcttctttttttttttgctttatttttatatttatttatttttgagacacggtctcactctgtcacccagtctggagtatagtggtgtgatctcagctcacagcaacctctgcctcctaggttcaagcgattctcctgcctcagcctcctgagtagctgcgactacaggcgtgcaccaccacacctggctaatttttatatttttgacagagatggggttctgtcatgttgtccatcctggtcttgaactcctggcctccggcgatccgcccgtcttgccctcccaaagtgctggggttacaggcgtgagccactgcacctggcctttttttgcttgatttattgttttggcatggaggtgggtcctgggcttggcttgtctgtccctcctgagttaaactgagctctatgcttttaggacctgctgggcctataaatatcaggtcgcagctgggctggagtgggatgccctggggtgggtgacatgcctggagttgtcacccgaaaccactgaagggctcttgcatatccctgccctgagcctgagaaagtggaagtcaggccttcagggttcaacaaatatatctttttttttctttttgtagggacaaagtctggctctgttgcttaggctgcagtgcagtggtgtgatcatggtcactgcagcctccaactcctgagatcaagtgattctcccacctcagcctccagaagagctgggactacaggcccatgccaccatgcctggctaatttttaaatttctggtagagacagggtcttgctatgtttcccaggctggtcttgaacttctggccacaagcagtcctcctgcctcactctcccaaaagtgctgggataataggcacaaactggctgggcccagtggctcacgcctgcaatcccagcactttgggaggccaaggcgggcggatcacctgaggtcaggagtttgagaccaagctggccaaaatggcgaaacccaatctctactaaaaatacaaaaattagccgggtgtggtggcacacacctgtagttccaggtactcaggaggctgaggtgggaggatagcttgaacgtgcgagacggaggttgcagtgagccgagatcatgccactgtactccagcctgggtgacagagcgagacgccatctctaaaaataaataaataaataaacaaagtagtatgtgaggcagagaaaactttcgccctcatagagcttgaccttcagtgcatggtatacagtgggtgcttaatacatattgattgaccaactgagtgatggtctaggaagcagactctcacacaactgccatttccatgacctttgtttcattttccttcttgcacttctcgaaaatcctcttagcattttctatcttctctggcccatggcaatcccaaagatactagggaccctgtctctttctttcttttttgtttttttgagacagaatctcactctgtcacccaggctggagtgcagtggcgtgatcctggctcactgcaacctccgcctcctaggttcaagcaattctcctgcctcagcctcctgagtagctggaattacaggtgtgtaccaccatgcctggctaatttttgtatttttagtagagatggggtttcaccatgttggccaggctggtctcgaactcctgacctcagataatccacctgccttggcctcccaaagggctgggattacaggcataagccatcaggcgggcttggcctttttttttttttttgagacagggtctcactttgtcactcagcctggacctcttgggctcaagtgatcctcttgcctcagcgccccaagtagctgggactacaggcgcgtgtcaccacacctggctaatttttgtatttttcatagagatggggttttgccatgttggtcaggctggtcttgaacttgtgacctcaggagatctgcccacccagcctcccaaagtgctgggactacaggcgtgagccaccgtgcccggcccaggctgtgtttttttcatcactgctgcatccccagcacctagcacggtgtttgtgcacagtaggcactcaataaatgtttattaaataaatgaaaaacctggaacaggc[134 bp omitted]ggcgtggtggcgggtgcctgtagtcccagctactcgggaggc[136 bp omitted]ggatgggcatggtggctcatgcctgtaatcccagcactttgggaggctgaggtggggcagatcacctgaggtcaaaagtttgagaccagcctggccaacatggtgaaaccctgtgtctactaaaaatacaaaaaattagtagggcatagtggcatgcgcctgtaatcccagctatgcaggaggctggggcaggagaattgcttgaacccaggaggtggaggttgcagtgagctgagatcacgccatggcactccagcctgggtgccagagtaaagactgtctcttaaaaaaagaactagcggccgggcgcggtggctcacgcctgtaatcccagcactctgggaggccgaggcgggtggatcatgaggtcaggagatcgagaccatcctgg[135 bp omitted]gcttgcagtgagccaagattgcaccactgcactccacgctgggcgacagaggagactccgtctccaaaaaagtaaataaataaaagaaaagaaaacaactagcaacattttttttttctgagactgaatctcactctgttgcccaggctggagtgcagtggtgcaatcttggctcactgcaacctccgtctcccttggcctcccaaagtgccgagattacaggcatgagccaccgcgcccggccagcagtcttttttttctgtttctttcttttttttttttttttttttttgagacggagtctcgctttgttgcccaggctggagtgcagtggcgtgatctcggctcaccgcaagctcc[135 bp omitted]tggcctcccaaagtgctgggataacacgtgtgagccactgtgcctggccagaaatagcaatttttaagcatttactgtatacctggcattattctaagcgctttatgtgccattaaatcattaagtccttaacacaatcttatgaaataggacctcttcctactcccattttatagattggttaactgagagccagagaggtcacataattgctcagtattagtgtctggtaagttgacatttgtccccaggatatttgcatggctggagtccctcctatcactcagttctgtgcttggttgttccctctttgcagagtactcctctggtggaacagaccatctcatctaaatttttaaagtctaaaatggccaggtgtggtggctcatgcctgtaatcccagcactttgggaggccaaggtgggcggatcacctgaggtcgggagttcaagaccagcctgaccaacatggagaaactccgtctctactaaaaatacaaaattagctgggagtggtggcacacgcctgtagtgccagctactcgggaggctgaggcgggacaatcggttgaacccaggaggtggaggttgcagtgagccaagattacgccactgcactccagcctgggcaacgagtgagattcagtctcaaaaaaaaaaaaaattgctagttctttttttaagagacagtcgtttgaacccaggaggttgcggtgagccgagattgcgccattgcactccagcctgggcagcaagagcaaaactccgtctcaaaaaaacgaaaacaaaaaataaacaaaaattagccaagcatggtgccatgtgcctgtggtctcagctactcaggaggctgaggtgagaggatcgcttatgccagagaggctggggctgcagtgagttttgatcacaccactggcctctagcctgggcaacagagcgaggccctgtctcaaaaataaatacataagccaggcctggtggctcatgcctgtaatcccagtactttgggaggccgaggtgggcgaatcacgaggtcaggagttcgagaccagcctggccaacgtggtgaaaccctgcctctactaaaaataccaaaaattgctgggcatggtggcgggtgcctgtaatcccagccactcaggaggctgaggcaggagaatcgtttgaacccgggaggcggagcttgcagcgagccgagatggtgccacttcactccagcctgggaagcagggcgagactgtgtctcaaaaaatagataaataaataaataagatacaaataaataaatacagaaataaattaaattaaattacactttgttcagccaagtgttggccacgtgttctgcttgactgcttaatacctgggaatatccccacaaacacattttgcaatggacatataatttccccgacaactcagcagactctctgacatttgttcagatttcagatctgacctggtggaactggggactagttattccttctctggaaggtctcccttgctcttctacctccactatctttctttttttgagagggaatctcgctccgtcacccaggctggcgtgctgtggtgcgatctcagcttactggaacctccccttcacgagttcaagtgattctcttgcttcagcctcccaagtagctgagattacaggcacgtgccagcacgcccagctaattttttggtattttttggtagagatggggtttcgctatattggccaggctggtctcaaactcctgacctcaagtgatccacctgcctcggcctctcaaagtgctggaattacaggtatgaaccactgtgcctggcccacctccactgtctctccccatgaatgcaggactgcctactttgtctcctggggttttgctgtcagagtgaaacttatctgtaaaagaataagacttctcagaggcctctcaaaggcagttgttggattgagcattttccaaggagactactttgaaccttcattttgaatatcggggttccgatcagctccttatgtcttgttatttttgcgttttgtgtatctgatggtcattgttcttcatggcctccctcctagggagaaatcaggccactccctatttctgatagccctagagttttgttgattgactctcggatgtgtttattttccagacccaggttcctgtcatggctaggggtggctgttggcctcgtccttaccctccactgggaatgtctttgtcttatgcacgtagtctgccttgttgttgcaaataacatttctgctataatcacaggatgccccggcttcttcactccattcgacgtaaccccttcccacgagctccaccttcactatggggtccaccagggtgctgttcagggttaagatcacctgcccttttatgctggagccagccaggtagattctatcctcgggcagcactaattcgatcgacttcaccacagacatggggggttggggggtagagagacattcctctctgtcccccatgtccctgaaattcccggttcgttggccctagtgaggtaatccatctatgacatcactcagctcagagttccgggaagtggggaccccagtggccaggaggggaggcaaaactgttgtttagggtgggtggttgattgggaaacctgtagtcctcactggttctttttttttttttttgagatggagtcttaccctgtagcccaggctggagtgcaggggtgccatcttggctcactgcaacctccgcctcatgggttcaagcaattctcctgcctcagcctcctgagtagctgggaccacgggtgcat[139 bp omitted]ggctttttctttttttgagacaaagtctcattctgtcacccaggctggagtgtagtggcgcgatctcggctcactgccacatctgcctcccgggttcaagcaattctcctgcttcagcctcctgagtagctggaattacaggcatgcaccatcaccatgctttgctaatttttttttggtatttttatttattttatttttattttttgtgatggtctcactctgtcagccagactggagtgcaatggtgtgatctcggctcactgcaacctctgcctcctgggttccagcgattctcccacctc[134 bp omitted]tggcctcccaaagtgctgggattacagttgtgagccactgtgcccaggtgcatacacactcattttcatcttaaagactctacatttatattggtctatattggaaaaaacatagagatatggccaggacctgaaatctggtgcgcactgaagttgatcagggcagtgtgtgcttaatctgaacatcgacaccatcaggaagcagcaactccctgcatgattgacatttctctttttttttgaggtggaatctcactctgttgcccaggctggagtgcagtggcgtgatctcggctcactgcaacctctgccccctgggttcaagcgattctcctgcctcagcctcccaagtagctgggattacgggcatgggggttacaggcacctgcccccgtgcccggctaatttttgttctttttgtttttgtttttgttttttttttgagattggagtctcactttgtcacccaggctggagtgcagtggtgcgatctcggctcactgcaagctccgcctcccgtgttcatgccattctcctgcctca[227 bp omitted]aggctgatcttgaactcctgacctcatgatccacccgcctcacttggcctcccaaagtgctgggattacaggcatgagctaccacgcctggctgacatttctctttatgcctgcatctcccccattggatgggaagtccctccagggtgagaccttgtctaagtgaactttgtgcccatcaatgtctgcgtgacccaggcaggatctggctcagccaggagtgggtgtggggggtggaatcaataaaagtttgttgaatgacttaatgacctctgagaatgtatcattttgcaaaagggaaactgaagccctttgcactctaacaattattcctggcacctgatttgcacatggtctggtgcctgagagggagggacattgaatcataggaggggctaggaagtacccattctctagcctggcaggccttatttcttgtcttggctgtatcttgcattattttatgtgatagcttttgtgggcattggcctcttatttccctaagtcaagctcatccaacccctgacccacgggcc[137 bp omitted]agctctgcctcccaggttcacgccattctcctgcctcagcctcccgagtagctgggactacaggcatgtgccaccatgcccggctaatttttttttgtatttttagtagagatggggtttcaccatgttagccaggatggtctccatctcctgacctcgtgatccacctgcctcagcctcccaaagtgctgggattacaggtgtgagccaccacacccggccacaaatttgtagtttcttaaaacattatgagatttttttgcaattttttttttagctcatcaggtattgttagtgttagtgtattttattatttatttatttatttatttatttttgagatggagttttgctcttgttgcccaggctggagttcagtggtgcaatctcggctcactgtaacctccgcctcctgggttcaagcaattcttctgcctc[133 bp omitted]tggcctcccaaagttctgggattacaggcgtgagccactgtgcccggccagtgttagtgtattttatgtgtggcccaagacaattcttcttccaatgtggcccagggaagccaaaagattggacacccctgctctaagtgacttgtgagctttttttctgagacgcctggaatagtttgttactcatgtttttaaatgattaacttgagcaattattactattttttgagacagagtctccttctgtcacccaggctagagtgcagtggcgcaagcatggctcactgttgccttgatcttctgggctcaagaggtcctcctgcatcagtgtcctgagtagctgggactacaggtgcacaccaccatgcctggctaatttatttttattttttgtagagaagggttctcactacgttgcccaagctggtctcaaactcccgggcgcaagagatcagccttcctcggcctctcaaagtgctgggattgcaggtgtgagccactgcacccagctggacaattaacctgagctaatttgaaaaattttgatgttctcaagatgactagggaactggagccctcaatcaacagtcctcagtatcttttctgcagggagggctagatacctcctctgtgacacttaacttccattatccaaggtgcttaggctgtgcccctcaccacgtgtacatgaagaatgcatgcccagccaatcacagtggctcatgcctgtaatcccagcactttgggaagtccaggcgggcagatcacctaaggtcaggagtttgagaccagcctggccaatgtggtgaaaccccatctctactaaaaataaaaaattagccggacatggtggtgcggacctctagttcctgctactggggaggctgaggcagaagaattgcttgaacccaggaggtggaggttgcggagagccaagatcataccactgcactgcaggctgggcaccaaagcaagactccatctcaaaaagaaaaagaaaaaaagaaaaagaaaaatgtattccctctttcagccacgttgagttttcgcaacagcgctacaaacagatgatgtgttctgatagaaataggctaggttcctgcagcaggtgctgtcattttggaagagctcaagccgtctcacaccctcaggtgggcctgctcatacctgtggtgtgggttctacctggctgatggctgagggtctagaattgtgtgcagtagcgttgatcgtgtactgaggttgcaaacagtgaacagcaccatctggacatcgtggattagaatgcaggagcttcccaaggctgctatgacaaaggaccacaaactcagtggctgcaaaacacacatttatttatttgttgatagagccttgctctgtcacccaggtgggagtacactggctcgatcttggctcactgcaacctccgtctcctgggttcaagtgattctcctgcctcaatctcctgagtagctgggattataggcacacaccaccctgcccagctaatttttttttttgagacacagtctcgctctgttgtccaggctgaagtgcagtggcacgatctctgctcactggaacctccgcttcccaggttcaagcaattctctgcctcagcttcccgagtagctgggattacaggcgccggccaccacacctggctaatttttgtatttttagtagagatggggtttcaccatgttgaccaggctagtctggcgactcctgacctccagttatctgcctgcctcggcctcccaaagtactgggattacacgtgtgagccaccacgcccggcccacacatttatcatcttacagtttgggaggtcagaagtctgaaataaattttaggggcagggcgggttctaggagtctttcttgctttttctagccaccagaggctgcccatcttccttgcctcttggcctgatctttttttttttttttttttttttttgagactgagttttgcttttgttgcccaggctggagtgcaatggcgcgatcttggctcaccacaacctctgcctcctgggttcaagcgattctcctgcctcagcctcccgagtagctgggattacagacatgtgccaccacgccaggctaattttgtgtttttagtagaaacggggtttc[132 bp omitted]cactttcccatctcctttgactttgaccttttgtatccctttttcacttattaggaccttttaaggacattgtgcccacctggatcacccaggagacgctccccaactcaaaatcattaactgaatcacacctgcaaagttgcaaagtccttttagctgtgtaaggcactgtattcacagatcctgggggcgaggacgtgggggtctagagacgcatatcttcgggggccatgatctgtctcctatattagggacatagcagaagtcccactgaccagatagaggagacttaatagagtgacgaagaaactgtaaaaagctaagtgggaactcaacatttttctgctcacagctctcaagggaaagaccaaagtcctccccggtggccttcaaggtattatatatcacccctctgacctcaactccccctcccctttgctcagtgggccccaaccacaccagccccttcctgctccctggacacctctaagccttttccggcctctgggtttgactttccctcctagacccatctgtccttggagtctcatctccgattccagctcaaatgtcatcttctctgagaggcccaccgcagtggccccagtgagagagtatcctctctccccgcctcccaccacatggctgctggtcactctcctataaggaatcatctgaaattatctgctttagttattcatttcttgcctgtctcccccagataggaattttccctccctgagaccaccaactgggtctgccatgtacaccgctgggttctgcagctctgagcaacctgtccggctgctttgtaggtgcccagcacaggtcactcctgtgcccgccaggactggtcagagtggaacagacagggcggagggggcagggcagccctgcccgcctggacagcctggagaaggcgggaaaacgaggcgggaaaagacagcaaacaagccctgcgggtgggtagagtggggagccctggcaggccctgacgccaggcagtggggcttggggcgatcgggcgagccatcagggtgcaggtggtctcctaggggccccccacattccctcgcagtatttacacattgattccggccttcttagacctactggtcaatgcgtgcgagtggggggctgcgaacggacttggacttaagagttcagggggtctgtaccctgggggtccccaaggctcctggggtgtccacgtgcggggggtgaccaggccctgccacgcagcccctttgcacgctgggcgcgcccagcagagcgcgcagggctgggcggagccgtggcccactaggcggaggcgccgtggacagaggcgggggcgccccccaccctctttctcgcttcccgccactgcgtcggccaatcaggaggcaggcgcccgcccccggcacggcctcctgcggccccgcaactcccaaatgccgagttttcgcgggaaaaaaatcagagcagctggcagcgcggcgggcagcgtttgccgagcgggcgctccgggtcgcacgcaagtccgcgcggggtccgggccacgcacgcggtttcatcgccatccccagccgggccacgcgcgcaggcagacaagctgttcgcggcgaccggagaggtgagcgggcgggccgggtcggggtgccagcccgggccgggcgcacggggctcgggaactttgcaaaactttcccgcgcggccagcccgggcgcacgcatgtcccgcactctgtcccgggatccagggcctccccttccacctaaccctcgggaatcgttccccggcacacatccggctggagccgggaccagcgctgcgtccccggagcccggcggggggtcgagcgcgccgggtgggggagggcctggcgagccgccggggaggatgtcaggctccgcgcctgcgcgcggggcgccccgcgattcaattgtcgcgcccgagcccgatttcgcgcgccctgagttccccgggagcatctgggccaatggggagcgagcggggcggggcggccgggtgctgcggagccaataagaggcggctcaagtgaaggggggcgggacttgacgagcgggggccccctctgtagtcccggcggcgggggtgggcgtgggctcgctggcgcgacccgcgcgggccagtgggagtgcgggagggacgccgagggtccagggtttggaggggcgcgagctgccgggggttggaggtcgaggtgagtcgcggggcgcgcgcgctcgcgggtggccgggacggggcggccggttaccatggccaccgcggggcgggcccggtcgcgcacgcgcgcggggggggccggcaaggagggggggcgtgggcaccgaggggtcccggggtccgcggatctcgggtggggtttttccctctcagtggcacttggttgagttcccccgggacttctgaagttccggcccgcgctggacttctgggattccctcttccgtaaataggaatccgaggaatgaatgaatcaatgaatgaatgaataaacgaaccaactcggccacttggcccgggcctcctttctcctctggtcgtggggaaggagggatgggttggaccttctgcttttctttcaattccctcttttcattctccttcctcctcaatcttcaacacttggctagtcgttaatgccttaagtgcttaatttgttgtgtctggtcctggccagggtctggctgtacaggaggactggaagggcatcctgggagtttcctggtgtccacaggccggacaaaagcaaccccgactccttagagcatggcatggctcagaggtgctggtaaaactgatgggggtttttgctgtccctcccctcagcgccgacaccatgtggatccaggttcggaccatggacgggaggcagacccacacggtggactcgctgtccaggctgaccaaggtggaggagctgaggcggaagatccaggagctgttccacgtggagccaggcctgcagaggctgttctacaggggcaaacaggtacacccgccgccagcacctttgttctatgcctggtccaggcctcgcgcctctgcagccaccagccgatactttctccctcccacctccccccccaacaacctcgtccggtcccacttcatctctcccggaaggagaagtccacagaaacctcaaatgcctgcgagaggaaggaacaaagggaggactcacagattgacacgctgggctggcggctggccctcgaatctatagggtctgggcttttaaacttcttttttcaaagctccgcctcaaaataatggctagagaaagaagttttggaggtggccgatggaaggctgaggaattttcgagaaagggcccaggaccatctggtagctaggacggaggggaccaggttttcttttttaaacatccaccaccaattgctctcagcctgtaccggttaagcatcagaccctgcgagtgtttgtttctaaaaatttggattagcttattcagagtctggagatggcgcttgctaatcaggaatttccgccaccctgagcctgctgtgctgcggctgctgctgacctggggcgtgtggtccccgaggggtccaccgaccctcgtctctttctctgttctgtctccagcccctcgttgcatttaaaatgtccccctttgatttcatagctgccacgtttggggcgctccctccattggcacctgggggtggaggtgctactttggttggtgtttttgtgggggactgtgggacctactgggagtggggtttcccggcaggatgagacagtgtgatcgaaggtgtaggtcccatctgctggagttggttggaccgtggggacgggcgtagactactggaactggattaaaagtcgtcagttgagctgcgtgtaccccactgtgttgttgttggattttgaaccgggtactgctgccatctggtgtctaggttggaaaataaacactgcgcccggccaggggtttttgggggctgggaggatcatgcctgctcactccagatgagacctgatgattaatttctctggcttgcatgccataggagaccttcattagccctcttcccgtaagagacgtgatgacttgagtcttaagaatctgagttaacccgccctgccccgggaggaggcgatctggagaacttggggagttgacggtgcaagccgcgtgtgtgcagagaagaggcagggccgggctcgacagaggagctccgcctggcgctctcttcctccctcctcctatgatgcgtgctccctttgtggcatccaaactgattttgatttgccactcagcctattgggtcagcacagaaggcttcatttcacaaagagtttctgaagcctgcaaggaccttctaagttcacagcgtaggtcagtggcgggttggactctcatgctcccaagttcaggagaggagataatgctgagtatccactctatgccagccaccgagctagcattttaacttttgcatttcaaccatgcaggaatgggaaaacacctagacacacctgccatgtagatttcaccatcggtattctgacttattaggtttatcttgaagcgctctgtctttctctctgcccgccaatccatctttttgggatgcatttcaaagtaagttgcagacaccagtccacctttcccttattactgcagcacaccgtcagtacctagagctcagtatttgtttttggttctgttttcattgattttttttgttgttgttcctatttgagacaggatctcactctgcccaggctgtgttgcagtggcacgatcacagctcactatagcctcagcttcctgggctcaagcaatcctccagcctcagcctcccaagtagctaggactataggcatgcaccaccatgcctggctagtttttgtatcttttgtagagatggggtcttattatattgcccagggtggtctcctgggctcaagtgaccctcctgccttggcctctcaaagttttggggttacaggcgtgagctacagtgccggacctaaaagctttgtctatagtgaaacagatgttagacagactgaataattttgacaaatgtctacatccatgcaacccaaaacccctatctcccctcatttgtaacataatacttgagtcatacaatagtgtctgtcacatttctaagtttagtgtgacaatgacaggaacacgtatgttaattagacatgtacattgtgcttttttttttttttttttgagatggagtttcattcttgttgcccaggctggagtgcagtggctcgatctgggctcactgcaaccttcatctcccaagttcaagcgatcctcctgccttagcctcccaagtagctgggattacagtcacccaccaccacgcctgattaattttttgtatttttagtagagacggagtttcaccatgttggccaggctggtcttgaactcctgacctcaggtgatccacctacctccgtctcccaaagtgctgggattacaggtgtgaaccactgcacccagccacgtacattgtgcttttaattgtcaggatgtccgcagtgatgacacctggccctagccttgccggaactcacccggactgaacagggagctgggattggaacctgggattttggtttctgagactgggctctcaacactgaatttcgtctcccaggtcagctctggtagttatgaaaagattcagtgttcctgtgtaaccttcataaccgcctcttagttcccttaccctgtggctgtttcccatgcagtagcttttttttttttttttttttttggagacagtttcgctcttattgcccaaggtggagtgcaattgcgtgatctcggcttacctcaacctccacctcctgggttccagcgattcttctgcctcagcctcccgagtagctgggattacaggtgtgcgccaccatgcgcagctaattttttttgtatttttagtagagatggggtttctccatgttggtcaggctggtctcgaactcccgacctcaggtgattcacacccccctcccccaccttggcctcccaaagtgctgggattagaggtgtgaaccgtcgcatccggcccccatgcagtagcttttaagagatcgtgtcgttgcttctgtcttccgggccacagagaggtgatgcagtttccccacttgcatggctgggaaagtgagctggcagcagggaggtttggacagtggcgggaaggcgggacagaggcacacagcagcacctcccagagcgtgaagtctgcaggcacccaggctaacgtgatagaaagcaacacagttcccggtgggcacaaatgggcagttgtccttatagaatgttctagagtgttcacagtctttttttttccctgtttaaagaaacctggcctagcagcccaaggtctgcagtgaagttgatggagaccccagagcagaacagagttgggtctgtctcggaatatggaggatctcgtggtggtctcacttgggctgaatagggtgacagtgatgtcacttgatgggcgggaacgcagggagctgatcgagggcagtgactttgggcagacggcccagcctaggcaacgggagaggcatctgcggcccccacccctcaatcttttttttttttttggctgcacatcaaaataacaatagctgtcttttgcggcacctttaacctgctcgggtacaacgctctgcactgtacataatcttttcagcatccctggcccgcgactcgccagctcccacatcatcttattttagatagggctaatacccaccacgctgcagcgcagtgcgaattcaatgaggttgtggatttgaagggcggagtgagccctgtgccaggctcacaatgaaagcgaaatcaatctcttagcacagggcctgtcccgctctgcactgtggatgtttggggccaggtcatcctctggctgggaccgtcctgggcactgcagggtgcggagcagcgtccctggcctccacccactccatgccagagcatcctgccctaccagtcatgacaaccacaaatattcccagagacttccatgcctcaaaggcaggattaaggtcagtctgatgcctcagttgaaatggtggcccaggaatggccttgcaagagtcacttgtcacagtgatgcctcaggtgtccccactggacggcccccttgcagagacctgcccttctgtctgcgggagggagggtccccaccaccagctcccacccactgcggcatccctcccccaggatggctccctggtagagggcgcggcctctgttagggtgactcaccactgctgttgtggccccgaagcagctgtagacaatctgtaaaccggtgggcgtggctttgttccaataaaacttgatttataaaaacaggtatggcggggcccagtggctcatgattgtaatcccggtgctttgggaggcc[134 bp omitted]caggagaatcgcttgaacctgggaggtgggaggttgcagtgagctgagatcccaccactgcactccagcctgggcgacagagcaagactccgtctcaaaaaaaaagcaaaacaaaaaacaaaaccaaaacaaaagaggtgcaggccagaattgtccccgtggacatagttggtcaattagattgcatactttaatccagcctcagttggtgtgtctgggttttctggctaggaagaatgctgctgtggaatgtgctggaacagatccttacgtgcgctgtgttggagtctttccaggtcaggggttctcaaacggatttcaggaccctttacatcatccagaatgatccaatagccccaggagcctgtgtctgtgtggattatgtctgccggctgttagtgtgttagaagttgaggccaggcatggtagctcacacctgtaatcccagcactttgggaggctgaggcgaggatcgcttgaggttgggagtttgagaccagcctgggccatgtagcaagaccccgtctctacaaaaaatgaaaattagccgggcatggtggcgcatgcctgtagtcctagctactcgggaggccaaggtgggaagatcacttgagcctgaaaggttgaggctgcagtgaaccaagattgtaccactgcattccagcctgggagacagagcgagactttgtctcaaaaaaaaaaaaaaccaaataaattgaaagctgagaaattcagagcacaagaagacaagcgcgccccctcttttagctgtcaacatggcggagccgtccctggtgacgcagcctccaaaggcctccctgtgccctcctgagaccgcaagagggaaagtggcagcgacagtgatcgtggtgtctttgtggcggttgtgttgacctcactgacccccgaagtgccgctctagggtctgtcctcagcggtgacccggccgggtcgaagggcagagttccgctgtcactagccctccacccgtcctgtgtgctgggatgccctcgcggcgccgtccacgccaccgccgccccctcttgtgggttctgtctcctccgtgtctaggatcctcctgcatccgtttttccttcctcccttctctccctccgtctgtcttgcccgcacctgaggttgtcgcagaggcgctgagacgggccagcaggagctgtggctgcccctcaggaaggcagagcagtttctcacttccttccccccaggtcccgtcaggcccctgcaggcactctctcttccggctggaggtccctcctgatcgaggcttacacggtctttgctgagctcctaaacttctggtttctatccctaaagttggagaaccactgctccccaaacccggtggcattatctgccctgctgtgccgctaggcagtgttcggcaccctgaaagagagcccctgaatgtggcacgaggggtaggaagtgggcagctcggtggggggggggggtgcagtgagcttttagtcttaagttttcgtttttttttttttttttttcttttttatagagatgggatctcgcttttttcaccaggctggtcttgaacccctggcctcaagtgatcctcccatcttgacttcccaaagtactgggtttacaggcatgagccaccacactcggccctttgtctaagttttcaaaaggaatcagcaaacttagttatcaagttgtatttgtatttatctggacacttttttttcttttcttttttttgcctttaagggagacagggtccacaaggccgggcgtggtggcttacgcctgtaatcccagcactttgggaggctgaggcaggcggatcacgaggtcaagagatcgagaccatgctggccaacatggtgaaaccccatctttactaaagatacaaaaattagctggggatggtggtgcacgtctgtagtcccagctacttgggaggctgacgcaggagaattgctggaacccaggaggtggaggttgcagtgagccgagatcacgccactgcactccagcttggcaacagagcgagactccgtctcaaaaaaaaaaaaaaaaaaaaaaaaagagacaaggtcttgctgtcgtccaggctggagtgcagcggcgtgatcatggcttactgcaacctctgttttccaggctcaagcaatcctcctacttcagcctcctgagtagctgggactacaggtgcctgccaccacacccaatatttaaatttttattaattgaaaaaacttttttgcagagacagggtcttgcctggtatcaaactcctgggctcaagtgatcctcctgcctcggccttctgagtagttgggactacaagcatgagctattgggcctggcctagcttttatacaatgcccatgttacaaaattccaaatgtccaaaaagcaaggagaatatcttccactctgccttgaccttcagtttcccccctgtagtaacctgtctgcttccagaagtgcttgaacatgtgtgcgtttgctatgggtttttttttgtttgttttgttttgtttttgagatggagtctcactctgttgcccaagctggagtgcagtggcgtgatcttggctcactgcaacctccacctcccaggttcaagtgattctcctgcctc[137 bp omitted]ggcctcccaaaatgctgggattacaagtatgagtcactgtgcctggcctgtttttttttttttgagacagagtcttgctctgtcgccaggctggagtgcgttggcttgatgtcagctcaccgcaacctccacctcccgggttcaagcaattctgcgtcagcctcccgagtagctgggactacaggcatgcaccaccatgcccggctaattttgtatttttagtagagacgaggtttctccata[133 bp omitted]ttgctctgttgcccaggctggagtacagtggcacgatcttagctcactgcagcctcgaattcctgagctcaagtgatcctcctgcctcagcctcgcaagtagcagggactataggctgtatactactatacctggctgattttaaacatttttatagagatgggttcctgccatgttacccaggctggtcttgaactcctagcctcaaatgatccttctgcctcagcttcccaaggtgctgggattatagacctgagccactgctcctgacctcattttttttttttttttttttgagacagtgtatcagtgtctcccaggctggagtgcagcggcgcgatctcgactcactgcaacccctgcctcttgggctcaagcaatcctcccaccacagccttccaggtagttgggactagaggtaaattttatagtgatgggttttgccatgttgcccaggtgatcttcaactcctggactcaagtgatcctcccgtcttggcctcccaaatcatacctgagattacaggcatgagccactgcacacagccccattttaacttttttttttttctgaggcagagtctcgctctgtcacccaggctagagtgcagtggcgtggtcttggctcactgcaagctccacctcctgggttcatgccattctcctgcctcagcctcccgagtagctgggactacaggtgcccgccacctcgcccagctaattttttgtatttttagtagagatggagtttcactgtgttagccaggatggtttcgatctcctgacctcatgatccacccgcctccgcctcccaaagtgctgggattacaggtgtgagccaccgcgcctagcccattttatcttttctgataatgattttccttttgccaaaaacggcaagtgggttttagattaagtcactccttttaccaggcacagtaggagaccttgagttagggctgaggtggtgtcatttaatagggacattcaacttcactaggttcaatgataggagactttacaaatttccataatggtaaatcttctttcatttaaattattattattgttaatatttttttttttgagacagagttttgctcttgttgcccaagctggagtgcagtggcgtgatctcaactcactgcaccctccgcctcccgggttcaagcgattctcctgcctcagcctcccgagtagctgggattacaggcacccaccaccacgcctggctaattttgtatttttagtagagacggagtttctccatgttggtcaggctggtctcgaactcctgacctcagctgatccgtccgccttggcctcccaaggtgctgggattacgggcatgagccatcgcacccggccaatcatttaaattattaatgaagaataaaaagaggctgggcgcagcggctcatgcttgtaatttcagcacttcgggaggctgaggcaggcagatcacctgaggtcgggagttagagatcagcctggccaacatggtgaaacctcgtctctaccaaagatacaaagattagctgggtatgctggcatgtgcctgtactctcagccattcgggaggctgaggcaggagaatcgcttgaacccgggagacggaggttgcagtgagctgagattgcgccactgcagttcagcctgggtgacagtgagactccgtctcaaaaaaaagaaaaaaaaaagtaagtcccacgtagccatcaccctctgcagtagtcatctgctgtgtctgatcttgttcattttgctcatttctaccctacccacttacctctacctgactggattgtttaagagatgggatcttgctgtgttgatcagggtggagcacagtggctattcacagatgtgatcattttgcatgagaaccccaaactcctgggctcccctgaccctccagcctcagtctgccaagcagctgggactacagatgtgagccactgtactggctcctactggatcattttgaagtgagttacagatgccataactataacacagacatcataggtacaggaatttcagtgcatcttccccagtggctcatggatcacacagatagaaaatcggtcaggagggccacgcgcggtggctcacacctgtaatcccagcactttgggaggccaaggcgggtggatcacgaggtcaagagatcgaaaccatcctggccaacatggtgaaaccctgtctctactaaaaatacaaacattagctgggcgtggtggcatgcacctgcagtcccagctactcgggaggctgaggcaggagaatcgcttgaacccaggaggcggaggtcacagtgagtcaagatcgtgccactgcactccagcctggtgacagagggagactccgtctcaaaaaagaaaaaaaaagaaagaaaatcggccaggatgccgggcacggtggctcagccctataattccagcacttcgggaggccaaggcgggtggatcaactgaggtggggatttcgagaccagcctgaccaacatggagaaaccccatctctactaaaaatacaaaattagccaggtatggtggcgcatgtctgtcatcgcagctactcgggaggctgaggcaggagaattgcttgaacctgggaggcggaggttgcagtgagccgagattacaccactgcactccagcctgggcaacaagagtgaaactccgtttcaaaaaacaaacgaaaaaggaaagttggtcaggatgctgggcacagtggctgggtcctgtaatcccagcactttgggaggctgagtcagaaggatcagttgagcccaggaatttgagaccagcatgggcaacatggagaaaccctgtctgtacaaaaaatacaaaaaactttctggacgtgatggcccatgcctgtagtcccagttacttggaggggccgaggcgggagggttgcttgagcccaggaggtcgaggttgcagtgagccatggtcgtgccactgccctccagcctgggcaacagggagggagaccctgttttaagaagaaaaagaaaattgataaagatgtagatgatttgaacaacacaagtaacagggttaccgtaatgacatggatggaatctgaacccagcaagagagaaaacacattcttctcaggccacgaggagtgcttagggaaactgaccacatacaaggcaagtcttaaaaactcgatttttatttttatttgtatttacttattttgtttatttatttgagacagtctcgctctgtcgcctaggctggagtgcaatggtgagatttcggctcactgcctcccaggttcaagctattctcctgccttagcctcctgagtagctggaattacaggcgtgcgccaccacacccagctaatttttgtatttttagtagagatggagtctc[132 bp omitted]ttgtttttgagatggagtcttgctctgttgcccggactggagtgcagtggtgtgatctcggctcactgcaaactctgcctcctgggttcaagcaattcttgtgccacagcctccccagtagctgggactacaggcgcccaccaccacgcccgggtaattttttgtgttttcagtagagatggggttttgccatgttggccaggctggtctcgaactcctgacctcaggtgatccatccgccctcggcctccccaagtgctgggattacaggcgtgcaccaccgtgcctgaccctttacaaatttagaacaattactgccttactgaccatgttttctctcacctgtggggtcagaacttaacaataactaagcttcctccttcgcgcttcgggttgtgcaagcttcctcctgcctgctttggggcctttctgcaatgttccagaagcggcatcaggaggctgcccagccagctcgtgagttgtgttctggagtcagagttttgtgccagcctgggccaggccccatccccacttcccgccccatttgcccctgtctacatcattgtactgggagacacttcctgtccctcctacgtagcccacgctaagcagggtgcttctatccacctcacctttccgatgtgggaagggccgaagtcatggaggggcgacccgtcaggcccagcaagggtggcacagatgttgtccctagtaacagatgagaggggatgggctgggactgcaggcctggctccccaagctgctcctgcgggtcaggggctgcccattagcctggccagggcccctcattggatccctcctggccgcccagaccacagcccttgcccccctgcctacccgccaccagttctcattggccctgcctccctgcttaactctgccgccttggcttcccctcctcggtctgtctcctccccgacttgtcctctgtctgagtctggcaggacagagtccgaccgtctggccccctcctggctccgtctgctcctcctgccgcctcctgctgtcgaggtcacttggttcttggcctgtctggcccccagccaccctgctggctgcctgctctccaggcagcccctcgcccagggctgcacctccgacctgtcctccgtcttgggtggggctgggactgtattttccatcctctgcagtggtctggtttccctcgtgcgctgaggcccctctgcttggctgcccctggctgccccatgcagctgagccatgagcgcggcctgtgtgcccctctcccgctggctggagctcaggatgctcacgccgctctggcagatatcgctgctgcaaacataggaggagcagctgcccctctgcgcacgtggccttcggacacatgtgagggccgctctagcttgggtgctcactgcgggtgattccaccctccaggggacactgggggatgtctggggacattcatgactcgggcgctcctggcgtggagtaggtggaggcctggagtgctgattagcaccctgcagggcccaggaaggccccaccccagagagtgatcagaccccaaatgtcagctttggcaagagcagtgtgcctggccacagaggtgctggcccggatgcagatgagtgccccatccatccctctgagcgccgtgtggcttgtcccatgctgcttttcctgacccagtgatattgggggcacttgacttctctctttttaagacggagtctcattctgtcacccacgctggagtgcagtggcgagatcctggctcactgcaacctccacctcccaggttcaaatgattctgttgccttagcctcttgagtatttgggattacaggcactaaccaccatgcctggctaattttttaattaatttttaatttttttatttttttgagacggagtctcgctctgtcgcccaggctgcagtgcagtggcgtgatctcggctcacggcaagc[241 bp omitted]gggtttggcaatgttgcccaggctggtctcgaactcctggcctcaagtgatctgcccacctcggcctcccaaaatgctgggattacagagtaagccactgtgcccagccccttttttagaaaaaattaataaactttattttctagagcagttctaggttcacagcaaaattgagcagaaggtacggagttcctatagaccccctgccccaacaggcatagccgcccccactgtcagcctcccccacagagcggtgcatcggttacagttgatggcccgatggccctctgtggagtcatcttcatctctgagtccacagtctacatacaccaaggcttgcccttggtgttaagtttttttttttttttttttgagacagtgtctcacttgtcgcccaggctggaatgtagtggcgtgatctcggctcactgtaacctctgcctcccaggttcaagcgattctcctgcttcagcctcctgagtagctgggactacaggcgcgtgccaccacgcctggctaatttttgtatttttagtagagacgaggtttcaccatgttggccaggctggtctcgaactcctgacttcaagtgatccacctgccttggcctcccagagtgttgagatgacgggcgtgagccactgtgcctggcctgcttcatgttttaaataacggctttattatatccctgcagttcacccagttaaagtacacagttgaggtatattcatagttgtgtaatcatcactgcagtctattttagaacattttgtcaccttgaaaggaaaccctgaaccctgtcccagctactgcttcctttttctgcatctcctcccgcagcccctggcaccctcaaatccccttcctgcctctgtggcttggcctgtcctggaaatttcatagaaatgggatcatgcactgcgtggccttttgtgtctggtgtttctcactgagtgtgatgtcctcaaggtgcatccacactgtggcctgggtcacagccttgctccttttcatggctgagtcgtattttattttgccttatattttatttattttattttatttcttaagacagtcttgctctgttgcccaggctggagtgcaatggcacaatctctgcttactgcaacctccgtctcccaggttcaagcaattctcctgcctcagcctctggagtagctaggattacaggcacccgccaccacgcccagttaagttttgtatctttagtagagacggggtttcaccatgttgaccagggtggtctcaaactcctgacttcaggtgatctgccctcgttggcctcccaaagtgctgggatgacaggcgtgagccaccgcacgcggcctgagtcatattttgacacatggatggatggccacattgtgttgatcctctcacctgttttttcttttctttctttctttttttctttctttttgagacggagttttgctctttttgcccaggctggagtgcagtggtgcaatctcggctcactgcaacttctacctcccaggttcaagcaattgtccttcctcagcctcccgagtagctgggattacaggcacctgccactatgcccggctaattttgtatttttagtagagacaggtt[148 bp omitted]caggctgttgcgagtgatgccgtgtgaacctgcgtgtacaggttgacgtgcctcttcctctccatccgtgccacctctccccaaagccagctgctctgtgctggagagctggccctgagcctcctcctggctcccaggcagcgcctagcatgtcagaggcactcacttctagctgggagaacagaggggctgaagcggatattggtgggccctcgatgtccacggtgggtttcagagcagcccttgaaacccttgtagctgtaggtgggtgtgtacatattcaaacgggtttttctgatgctggtggatcgcttgcttgagccccggagttcaaaaccagcttgggcaaagcagcaagacctcatctctaaaaaaaattagctgggcatgggtgatgtgtgcctgtggtcccagccactcaggagcctgaggcaggaggattacttgagcccaaggttcgatgctgcagtgagctacgattgcaccactgccctccatccttggcaacagagtgagatcctttctaaaggaaaaaaaaaaaaaagtccgggtgcagtggctcacgcctgtaatcccggcactttggaaggttgaggtgggcggatcacgaggtcaggagatcgagaccattctggctaacatggtgaaaccccacctctactaaaaatacaaaaattagccgggcttggtggcgggtgcctgtaatccccgctacttgggaggctgaggcaggagaatggcgaacctgggaggcggagcttgcagtgagccaagatcgtgccactgcactccagcctgggcgacagagcaagattccgcctcaaaacaaaaaacaaaacaaaacaaaacaaaaaaaaacaggccgggtactgtggttcatgctgtaatcccagctctttgggaggccgaggtgggtggatcccttcagcgtaggagttcaaaaccagcctggccaacatggcgagaccctgtctctactaaaaatacaaaaattagctgggtgtgatggctcatgcctatagtcccaagctactcaggaggctgaggcacaagaatcgcttgaacctgggaggtggagattgcagtgagctgagatcacacccctacactccaccctgggcgacagagtgagactccatctcaaaaaaaaaaaaaaaaaaaaaaatttttttctggaaaagatgagtcagcctttatcaggttcttaggtttatggtgaacaaagaaagaaagcctgcagagaagggccttggccttcactgtgacccccatgctgtttgcatttgaacagccgtcaggccttggatccccaaggggcgaaaggaggaagagctgacattctatgtatgtctctctcctcccttttcctaaggtctctctcctcccttttcctaaggatgctcctgaaccagggcatttctgcctctaggggacacatggtgatgtctgggggacatcggttgttgtcatgactggtggaggccagggccgctgcagtgcctctgcagtgcccagcacggccccacggtccagtgcccagagggggagacccagcccatcccagagtggtcagccctaatgtcagccatgcttaggtcgagaaacctgtattaattacatggaaaccaaccgagtccaatcctgctcgcaccaggcacgggataaactcctgacggggcagacgtggaaaccagggggacccccagctcctgggattcacctcctctctcccttcccactcagtgtgtggattttaatgcgtgcagcctcctgggacctcagtagggcacagcatcatgggataaggagtttcttgggggcctgtggaatccttcaccagggggtctcacccagggtgacttcacacccccccaccccataccgtatgatgtctggggacatttgtggtcgtcacaactacggggtgctcctggcatggagtaggtggaggccagggacgctgctcagcaccctgcagtgcccaggatggctccgccccagagaatggtccaggacctggccccaatgtctgcagtgccgggggagaggaacttgttgccttgggggcatctagatggcaaatcatcaggaggggggggtcctagatggcaaaccaccgggagagggtccttgttgggtgttggtggagtgtgaaggggcagcttctgacaaaatgcctcggcttctccagcccccagatacagctcaggtgatgagctcctccttgcatacctgctgagtcaggtgacccgaggggcaggctgtggagccaggccccaggggttgagcgcatcaggataaaagcgcacaaagggcgggtggagctgagggtcagaggaggtgccctggcaggcgagattggcgctggagccttacccaggaagctcataggaagctcatggatgctggcatgtgcctcttgctgttcaggtgggacagggtctctctgtctcgacactggacagtgggaccgtcctgggcactgcagggtgccgagcagcgttcctggcctccacccactccatgctaggagcttctcccagtggcgacaaccacaaatgtcccagacgtggcccagcgtcccccggggtctgaatcatgtttggttgagaagcagtgacagaggtgacacatgttcactgtcacaaaagctgccgtaagcacgaagtattaggaaaaactcccaagacccccatgtgtgcgtggtgccccgtgatgatgttttgtgcttctgggtgcttcctgcatgcagtgccaaaagccctcgctagaggggcctgagaccctgagggaagggactggggtgccgcttgtgagcgggacagccccctggcatggcccaggtatcatggctctttactctgatgcagattgccccccccccacaagggctgggacacagtgtttggttcatcactggtgcccacagatgcccacttggcatttggtggctaaacagcgtctgcctctggtgtccctgcagatggaggacggccataccctcttcgactacgaggtccgcctgaatgacaccatccagctcctggtccgccagagcctcgtgctcccccacagcaccaaggagcgggactccgagctctccgacaccgactccggctgctgcctgggccagagtgagtcagacaagtcctccacccacggtgaggcggccgccgagactgacagcaggccagccgatgaggacatgtgggatgagacggaattggggctgtacaaggtgagcctcccctccgcagctgctctggggttggacgttctccctgccattctggtctttgcatacccagggctcacaggaggggcttcccacgcgcctctctagctctggctgggcagaaatggccaaggggtggtttcctgcacgttccttgaggggaacatggtaccctgggattcctttgtggacctctagagcagagtcctgttcggggcctgcaggtgtcttctccgtgaagcttgcagtggctgtgacgtttctgaacttgctgctaccatgtaagatcaggaaatgtcacagaaagatctgggtttccagcttttttatttttttattttttttttggcagggtctcactttgttgcccagcctggggtgcagccgtgtgatcacagctcactgtagcctcgaactcctgggctcaagtgatcctcccacctcagcctcctgagtagctgatgttataggcatgtgccaccacgcccagctaattttattttattttattacttttttaatacatggtctcattctgtcgcccaggctggagtacagtggtgccatctcggctcattgcaacctccaactcctgggttcaagcaattctcgtgcctcagcctcctgagtagctgggattacaggcatgtgccaccacacctggctaatttttgtattttttgtagagacgggatttcgccatgttggccaggctagtcttgaactcctggcctcaagtgatcttcccgccgcagcctcccaaagtgctggaattataggtgtgagccactgcacccagtctgttttattttttagtagacacagcgtcttaccatgttgcccaggctagtcttgaattccggggctcaagcgatccacctgcctcggcctcccaaagtgctggtattccaggcgtgagccacgacgccctgcctggatttccagcttctcttgacaaatgggcagctctggtctctcagggcctcccagcagctgtggctgaagcagagccgcaggggcctttgttaagacagtccatgccccctggccccgcatccccgtcacccctgccggggctggtttctcatggtcagcggttcccagccagggaggagaaacctcgctgtgggcattcgagtttgcgccctggttccagagcatcccagtgtccgagaaccaaggtggtctcccgtcagttttcctcaccccgttgggatgccagacttccctcattcctcacaggtcaatgagtacgtcgatgctcgggacacgaacatgggggcgtggtttgaggcgcaggtggtcagggtgacgcggaaggccccctcccgggacgagccctgcagctccacgtccaggccggcgctggaggaggacgtcatttaccacgtgaaatacgacgagtgagtcatggcaggtgggcgggcctgggtattcaggctctgtgacgcgcatccttggctgcgggtgttcaggccagagcttggcactgtctcgagatggtgatcaggatctggggccccatcctcgaattcctaacagcatacgaggctgcccacttggggactagcctggggacccgaagccggctgccccctcctgtgtctccgcggagggttctgctcgatcagtggctgaaactgccaccccatcagtttttctgttttattccatcttccgggtttgtcatctctccctcatccccacccctaacgtcagtctccagtctttgcacaagtgtttactgggcacttcctacctgccaagttcggggtccacacaccagtggacacagatggtggctgcgtctgtccgtgctgccatcgtgagatttcacagacggtgtggcttaaacacggacattggttgacttgctcactgcaacctctgcctcctggattcaagcgattctcctgcctcagcctcctgagtagctgggactacaggtgcccgccaccacacccagctaatgtttgtatttttattttattttatttttattttattttttcgagacagagtcttactctgtcactcaggctagagtgcaatggcgtggtctcagctcactgcaacctccgcctcccaggttcaagcgattctcctgcctcagcctcccaagtagctgggattacaggtgtgtggccaccacgcctggctaatttttgtattttcagaagagatggggtttcactatgtaggtgaggctggtctcaaacttctgacctcgtgttccgcccgcctcagcctcccagagtgttgggattacaggtgtgagccactgtgcccagcttattttatttttttgagacagtttcactctgtcccccaggctggagtgcaatggtgtgatcttggctcattgcaccctccatctcccgggttcaaacgattctcctgcctcagcctcccaagtggctgggactacaggcgtgcaccactgcgcccagctaatttttgtttttgttttgtttttgagacagagtttcactcttgttgcccaggctggcgtcaatggcgcgatctcggctcaccgcaacctctgcctcccgggttcaagcaattctgcctcagcctcccgagtagctgggattacaggcatgcgccaccacgcctggctaattttgtatttttagtagagatggggtttctccatgttggctggtctccaacttccgacctcagatgatctgcctgcctcagcctcccaaagtgctgggattacaggcatgagccaccgtgcccggccatgcctggctaatttttgtatttttagtagaggcagggtttcacc[133 bp omitted]gattggggcccaccctactgcagtgtgatctcatcttaatatgatttcatctgcaaaggttctatctacaaagaccctgtttccaaaaacaatcctattcgtgggtactggggatcagcctttgaacatctctttttgcaggggacacgggcaacccataacaattttgtacctggaatgtgccttaatatacctgtgtgttctcaacaccagcatataagcctgttgggaggggcctctgcacactgtcgggaggggccgtcccacctcggctcgtttcccattgagggaaggaggcttggtcttagcacggggtctaaggcccgggctttcctcccagctacccggagaacggcgtggtccagatgaactccagggacgtccgagcgcgcgcccgcaccatcatcaagtggcaggacctggaggtgggccaggtggtcatgctcaactacaaccccgacaaccccaaggagcggggcttctggtacgacgcggagatctccaggaagcgcgagaccaggacggcgcgggaactctacgccaacgtggtgctggggtgagcctcgcgtcctggggcgagcccttcctctctcctttcctcccctcccggggcccccggactggctttgaagccgtccagccagcgctgtgtgtgcgaggcccttagcctccggcctggccttcctgcctcccctctggggtctgttcctgctcactgctgagcatctttctaagaccgaccaccttgtgcccctgagtgcctctgcccagggaactgtctctgacccccaggccctgacaggcagagttgtcaaacttcctttttctcatggtgttttttttatcgctctgttgcccaggctggagtgcagtggttcgatctcggttcactgcaagctctgcctcctgggttcatgccattctcctgcctc[173 bp omitted]tgcctggcctcaagctttctttttctctcttgtttgtttcaaatttggtgaataggtcccattcacagggtcaaaatagaaagcacccaagaccacacatgaaggttctccctcctctgcctggtcacccagttcccctttttggcgacatcactgttaccaactttccagggacattctgttcataaacatacacgccaaaccacaccgcttaggagttggcaaactgcagtccacaggcctgctgtggtccgctgccggctttgactaatagttttattgggacgtggtcacacccatttttatcttattacctgtggttgcttttgtgttataagagcagagttgtgtagttgcaacagagactatgcggcctacaaagctgaaaatccttcctatttggccatttgcagaatcattttgcaaagcctgttctttctcccttgcctctttgtgtgtgtgtgtgcgtgtgtgtgtgtgtgtgtgtgtgtgataaaatgtatgtaacagaaaatttaccttttttttttttttaaaagacagagtctccctctgtcgcccaggctggggtatagtggcatgatcttggctcactgcagcctccgccttccaggttcaggtgattctcctgcctcagcctcccaagtagttgggattacaggcgcccgccaccacgtctggctaatttttgtatatatatatatatttagtagagtctgggtttcaccatgttggccaggctggtctcgaactcctgacctcaagtgattcgcccgcctcagcctcccacagtgctgggattacaggcatgagccactgcgcccggccaaaaatttaccattggaaccatgtttaagcgcacagttcggtggcattaaacgcatttacgttgttacgcaaccatctccagcactttgtcctcttcccaaactgaaactctgactccatgaaacactcactccctagcccctgacacctctgcatcctactttccatctctgtgaatctgacaactcgggggacctcctaggaatgggatcacacaggatttgtcctttgcatctgttcactgacgtcactgagtgtgatgtccttgaggtgcatcaggctgtagcctggtcggaatttccctcctttttgtggccgagtgatagtacgtgacgtgttgtctataaacacgagcatcttggcaacggcgttccaagtacaggtacagcaagcacgcagaggtcctgggctgggacatttatggtgcatctgtggcccggtagggaggtcagtgagctgcgggtgatggaggggagtggctggggctgtgggagcctcctcactgagtctgggccttaagcgcgtggctcgggtgtggtgtggaattggtctttattctctgctaggcgcatttctgaatctgagattttctgagaaactatctggattgttatatggaatctgatttttaaatgctggtgactaactttttttttttgagacagagtcttgctctgtcacccaggctggaatgcagtggcaggatctctgcttactgcaacctccacctcccgggttcaagggatcctcctgcctcaccctcctgagtagctgggactataggtgcccaccaccagctaatttttgtatttttagtggagacagagtttcaccatgctgccc[136 bp omitted]ctgccgctgtgtaagatgtgcctgtgctcgttcaccttccaccatgattgtgaggcctccccagccatgcggaactgtgagtccattaaacctctttcctttctaaattacccagtctttattatttagtatgtctttattagcaacatgagaacagactcatacaaccccttccaagctcttgtggtggctgatataatccactactttgcggttgaaggatgggggcttcatttttttttttttaacttggttcttggaggccgcctgcagttcccagggcccacctgcagttccttgccccatgggcttctctgatgtggctactgatgtcaagctagcaagggaggtcttcagctagtcggctagtaagatatagagcatcgtgtgatgtgtcatcgtcccaggagtgacagtccgtcagctctgctgtattttatgggttaggtttaagtgacagccctgtccatacttttatggggagaaacgcctacaaatgcgtggttgccaggaggtgggggttgtggggccaccttaggctccatccgcaccagttatacaccagctgctgcccgtttaccctgagacagataacctgcccagccagcacccacgggcttcctccacctcagtccctcccctagcagaagaaaactgcatttctgcacattgactgtcacaaggcaggggtgtcaccaggcagggaaacgaagatacctggccgaccacaccttggggtgtttgggttcttcgattcattcatgcttgtgtcccgagccctctggggatgcaggaggcacagcgggaaagggaacaggtgctcggtccaggcggccttggggcagacactgtcccttgccagccccatgggagcttccagggatgcagtgagagggtcacgctgagccgagttgtgcctcgcaatgagtttgtgatgtgtgcccatcgttagcaccttcgacttctatcatctgctgagtcaggcatcatacaagatgagacagagaaacgcgattgcagtccctgtcttaggaggcacccagcctggtgtgggagacagatctgcagatgacagaccagggagatgcgtgctctgagacaacacgcgaggatgggtggcagagatggccgagtggactctgggattgggaggctcagataggtggctgagccccaggtcctgctctgggcagtgctaggagctaccagcctttgccagggctgacttctaaatgcaagccctctacactggtgtctctgcagtgtggggggtcaattcattcatcattcattttcattaaattttaccttgcattgtagattcacatgcagttataatgtagagatggctaggcgcagtggctcaggcctgttgtcccagcactttgggaggctgaggtgggaggatcgcttgagcctgggaggttgaggctgcagtgagccgtgatcacaccactgccctccagcctaggcaacagcaagagagtctgcaaaaaaaaaaaaaaagtgaaaagaaaaaaaaacaggctgtgtaccctttattcagtttcccccagtggtaacaacttatattaataaactatactgtgttatcacaactggaatattgacattgatacagtcaaaagtgagtttcctcctcacaaaatccttctcgttaccccttttatagccaaacccacctccccatccccacctggtccctgacccccggcaagcaataatttttttttttgttggagacggagtctcgctctcttttgttctccattcatacaattttgtaatttcaaggattttacaatttcaactttgtaataaggattcccgttatataaatggaatcacacagtatgtaaccttttgggattgattctttttttcccgactctccataattacagattaattgaagttaccgcatatcagtagctcattccttttcatccctgagtagtattctgtggtatagatgggccacttttttttttttttttttttaacgacccattggatatctgagctgcttccaggattttttgctgtttaagatttgtttatttttttgagacacagtcttgctctgtttcccaggctggagtgcggtgatgtgatcttggctcactgcaacctccgcctcctggattcaaacgattctcctgcctcagcctctggagtagctgggattacaggtgcgtatgccagcacacccagcttatttttgtatttttagtagaggtggggtttctccatgttggccaggctgatcttgaactcctgacctcaggtgatccgcccgccttggcctcccaaagtgttaggattataggcgtgagccacttcgcccggccagtttaggatttatttgagtaagttaataagaaacagtggtctgcaattctcttgttttgtatggtctttgttggttggtcaataccagccttataatgtgagctgggaaatgtttattcctttttctgttttctggaagagattgtgtaaaatttacgttaattcttctttaaaggtttgatagaattctttaacgagaccataggctgggtgcagtggccgatgcctgtaatttcagcacttggagaggcggaggtgggcggatcacttgaggttaggagtttgagaacagcctggtcaacatggtgtgaaatccccgtctctactaaaaatacaaaaattagctgggcttggtggtgtgcacctgcagccccagctacttgggaggctgaggcaggagaatcgtttgaacctgggaggtggaggttgcagtgagctatgatcatgccattgcactccagcctggatgacagagcaagattccgtctcggtggggtgggggaggaagggaagctttactgaggccatggagatctggagatgtcttctggaggagcttttatgaattgaatttcttctatgcttatgtgactgtctggactatctgtttcatcatgtttgagctgacatactttctgggttttggggaattagccggtttctctgagcataaagtcatttgtattatttccttattctctgatgcctgaaggatctagtgagatccctgttttattcttggtgttggtaatttatgttttctttttatttttgtcagtctttaccaattttatttttgaggatcttagacctttccctcccttctcatttatttgtacagcaagaataagacagtttttttttgtttgtttgtttgttttgagacaaggtctcactctgtcacccatgctggagtgcagtggcgtgatctcagctcactgcaacccccagatcctggcttcaagcgatcctgacctcaggtgatccactcgtctcggcctctcaaagtgctgggactacaggcatgagccactgcacctggcataagagttttgttttggtcaggtttttttttttttttttttttttttttttttgagataaggtcttgctctgttgcccaggctggagtgcaatggcaagctctcagttcactgtagccccaacctcctgggctcaagcaatcctccaacctcagcctcccacgtagctgggaccataggcgtgcaccaccatgcctgactaatttttttttttgttttttgatgagacaaagtctcgctctgtcacccatggtggagtgcagtggcacgatcttggttccctgcaacctccacctcccgggttcaagcgattctcctgctttagcctcccgagtagctgggattacaggcgtgctccactgcacctggctcatttttttttgtattttcagtagagacagggtttcaccatgttggccaggctggtcttgaactcctgaccttagataatccacccgcctcagcctcccaaagtgctaggattacaggcatgagccactgcacccggccattttttttttttttttttttttaattttcggtagcaatgggggtctggctagattggtctcgaacttttgagttcaagtgatactcctgcctcagcctcccaaaaggtgctgggattataggtatgagccactatacccagtcttagaatatgtttttctttctttttttttgagacggagtcttgctgtttgctgtctcacctaggctagagtgcagtggtgcaatcatagctcactgcagccttgaactcctgggctgaagcaattctcctgccttagcctccttttccttaacacttaatttgttgaggaatcctggtcatttgtcccaggagttccaaatggctctatccagactgtagagatgaccaggagatgtcacttgctgtgtgcgtctgtgctacctgtgagctggtaggtcagtgtgttcccacactgtcccatagccaagagccacctgtgctgtgcttgaaatgtggccaggaggaactggaatgtactgtgagtgtaaaatacacatgggtgccaggcgcagtggctcatgcctgtaatcccagtactttggggggcc[134 bp omitted]gaggca[136 bp omitted]aagaagaatgtaaagtagctcattaataactttttcatattcattccatgttgaaataatcttttgtctacactgggttctatggaacatattccaattacttccacctatgtttacctctcaaacgtgcttattaggaaatttagaattacatacacagcgtgtgttcaagtgctgtttccctcggacgttgctgatggggatgtcggattattgatctcgggggatcagtttcactcacaggagttcttgtattttgatgtaggccattggatcaagcgttgcctttatgattttttttttttttttttttttttgagatggagtcttgctctgtcgcccatgctggagtgcagtggcgtgatcatctcagctccacaacctccatttcccaggttcaagcgattctcctgcctcagcctcccgagtagctgggattacaggcacgggccaccatgcccagctaattcttgtattcttagtagagacggggtttcactatgttggccatgctagtctcgaagtcctgaccctcgtgatccacccaccttggcctcccaaagtgctggaattacagatgtgagccacggtgcccaacttgatttatttatatatttttttgatgagatggagtctcactctgtcgcccaggctggagtgcagtggcacgatcttggctcacttcagcgtctgcctcctgggttcaagcaattctcctgcctcagcctcctgggtagctgggattacaggtgcgcgctaccatgcccagctaatttttgcatttttagtagagacagggttttaccatgttggccaggctggtctcgaactcctgacctcagatgatcggcctgcctcggtctcccaaagtgttggaattacaggtctgagctaccatgcccggccaacctttatgagtcttgcttgtcggttcttgtggatttggtgctccttagccaaaggttcaaactcattcttcccagggcatcctgcaatgaaactctggtt[134 bp omitted]gcctcccgagtagctgggattacatgcgcgcttctccaagctcagctaatttttgtattttcagtggaggcgggggttcaccatgttggccaggctggtctcgaactcctgacctcggcctcccagtgttggtattacaggcgtgagccactgcgccctgttccgtttcatgttgcttctgtgagtgcagctttgattgctagggggcgtagctgagctgttgccccaggcatcccgagaacccgtggtgttcaagtgctgtgagtagatttaggggcctcggcaggccagaatgttccagcgtcctcgttccttgcagggatgattctctgaacgactgtcggatcatcttcgtggacgaagtcttcaagattgagcggccgggtgaagggagccccatggttgacaaccccatgagacgtgagttctgagccagcctttccccatcttccgcggtgggcacggggcgggggctcttgtcccgtctctggcttggccgggccccgccggagctgaccctgccgccccgtgcccagggaagagcgggccgtcctgcaagcactgcaaggacgacgtgaacagactctgccgggtctgcgcctgccacctgtgcgggggccggcaggaccccgacaagcagctcatgtgcgatgagtgcgacatggccttccacatctactgcctggacccgcccctcagcagtgttcccagcgaggacgagtggtgagtgcggccctgcccgccgcggggagaccagagcgccccctacaaatccccagaggggcactgaggagatacaggagaggggcaggcgcgggggctcacgcctgcaatcccagtgctttgggaggccgaggcgggaggatcacttgagctcaggagttcaagagcagcctgggcaacacaagaccagcctgggggacgtagagactctgtttctttttttgtttgtttttttgagacggagtcttttttcttttctttttcttttcttttttttttgcggcggagtctcgctgtctcccaggctggagtgcagtggcgcgatctcagctcactgcaagctccgcctctcgggttcacgccattctcctgcctcagcctcccgagtagctgggactacaggcgcccgcctccacgcctggctaattttttgtatttttagtagagatggggtttcaccttgttagccaggatgttcttgatcccctgacctcgtgatccgtccgtttcggcctcccaaagtgctgggattataggcgtgagccacctcgcccagccttgagacggagtctaatggcacgatcttggctcactgcaacctctgcctcccgggttcaagcaattctcgtgcctc[134 bp omitted]tcagccttccaaagtgctgggattacaggtgtgagccaccatgcctggcctggagaccccatttctacaaaaaatgtaagaaaattagctgggcgtggtggtgctcgcctgtggtcccagccacttgggaggccgaggtaagaggatcggatcgctggagcccaggaggtcgagggtgcagtgaactgtgatcgcgccactgtactccagcctgggtgatggaagtgagaccctatttctttagaaaagtaaaaatgaggtcaggtgcagtggctcatgcctgtaatcccaggactttgggaggc[135 bp omitted]tgaggtaggagaatcgcttgaacctgggaggcggaggttgccgtgaactgagatcgcgccactgcactcaagcctggcgacagagtgagactaagtctcaaaaacaaaaaaaaagggggggtggtgaggaaatcttcccatgttgcttgagtgggtgagacctgcggccagccagggaacagagtgcagggggcttcacagcttctgtgagaggaggtttcgtagccactgtgttcctggcgcacataatgacaattgcggatgtggatggggaggttgtgatgtgctaggctcgggtctgaggacctgcctgtggtcattcctccagcacagaagtgggtgttgttgttgccctgccccccctccccacatcgtagagatggggaaactgagtccacggcagtgagaaggcactcatggaatctgcacgtgtatttcccacatcccacattgcgttcactctcactgttgcaagatccgtggaattctccgtggaaggccaacagagaacctgctttcttttttttttgagatagagtcttgctctgtcctccaggctggagtgcagtggtgcaacctcggctcactgcaacctctgcctcctggtttcaagcgattctcctgcctcagcctcccaagtagctgggattacaggtgcccaccaccatgcccggctaatttttgtatttttagtagagatggggt[145 bp omitted]aagcggcctgcaatgtggacagggcaggatggtagtggtgccaggcggggagagccatgtccgtggtgtgtgggcagagggcacatgttggctgagacatctgccaggctaggcgtgggcagtgacaatcccgacctcgcaggtactgccctgagtgccggaatgatgccagcgaggtggtactggcgggagagcggctgagagagagcaagaagaaggcgaagatggcctcggccacatcgtcctcacagcgggactggggcaaggtgaggcgggtccttcccacgtgcccgtggcccctccccgcctgccagggctcacgctgttgttctttgtgtctgtgcctgggacagggcatggcctgtgtgggccgcaccaaggaatgtaccatcgtcccgtccaaccactacggacccatcccggggatccccgtgggcaccatgtggcggttccgagtccaggtacctgcagcgtcccggggctccaggggccacgcgggctcatcctgcttttctgggggcagtttctcctggctttggccagccaggggtcagggtggttaccagtggtgcctcggctagccgaggaggggtgtggaaagcctgcaggtttgggtttactccttattttaccagggacctgcaatgaatccttgggggtgggggctgctgctctgctcagagacacgtaaggtcattcccaaagctcctgtcccagggaaggggtggcatctgctaagagggacctgtctcagcgctggttgtgatctatcattggggcagcccctgcctgtgactgggtgttgacagtgctgggcgctgtcagctgtgggctgtgtgtcacggcagacgagacactttggcactagtgacattggagccagatggttctctggggcggggccatcctgggcactgcagggtgctgagcagcatctctggcccccacccactccatgtcctcccaagtcatgacaaccagaaacgtctgcagacatgagtgtccccttggaggcaggattgcccctgggtgagatgcactgagctgggtggacaagctgggcctcatcatggagttcatggggccaggcgtgcagggctaggagctcctggggcagcgctgtatccctagtgctcagcggccagccggggccccatgctcaggccagggcctctcaaggcattttgtggagtgagtggcaggctgcacctcaaccggcctaatgaaggccggcttttatatcataacctcatttagaactcagtcacccccacttttattttttttgagacggagtcttgctctgttgcccaggctggagtgcagtggtgcggtcttggctcactgcaacctccctctcctgggttcaagcgattctcctgcctcagcctccccaatagctgggatcacagggacatgccaccacgcccagctaatttttgtatttttggtagagatggggtttcaccttgttggccaggctggtcttgaactcctgacctcaagtgatccacccacctcggcccccgaaagtgctgggattacaggtgtgagccaccgtgcctggccgtcaccccccattttctagaggccgaagaggagcatcggagatcagcagtgaggatgccccgtgcacgcttgatggggctggaattcacgccagctggtttttttttttttttttccatggtgcagctcaactccggccgtctctagccgagcagcacacgtagtaggtgactcgcaggcctgaggagtttggtgtaaaagtgaggccgctggctgctcggggtagggaggaggagggcggtggagcttctctgcagcagtcattgcagaggacaccatgtatatcttggtggcatcctcaggtcagcgagtcgggtgtccatcggccccacgtggctggcatacacggccggagcaacgacggagcgtactccctagtcctggcggggggctatgaggatgatgtggtgagtgtgtgtgtgggaggggtgggggagggttgctctagttttttggatggtggtaaaatacatagaacaaaatttcccatcctagccgtttttaaatgcttggttcccggtggcgtgaagtatattcccattgctatgcaaccatcaccaccaccatctccagaactttctcatcttcccaaactgaaacgttgtctccacgaagcactcactccccaccccctcccagtccctggcaccgcccaacctggttcctgcctctgtgactctgacgactctggagacctcctgggagtggaatcgcacggcctgcgtccttgcatgcctggctcctctcactgagcccgacgtccttgctttgtccatgttgtcgcatgtgtccggattccccttttgttcacggctgagtcctattctgccgtgcggagggaccatgctgtgttgatctgtctgtccgtgggcactggggttccttcccctttcgactgctgtgaatagatctgctacgaacacggctgtacaagtatctccagcccccgttttccattcttttgggtgtatatccagaagtggaattcaagactcctgtgataattccatgttgagtgttgttttttttttttcttttttttgagaccgagtctcattctggctggagtgcagtggtgtgatcacagctcactacagccactacctcctgggctctagtgatcctcccatgtcagcctcccaagaagctgggactacaggcaggcactgccacgccaaactaatttttgtatttttttgtggtgatggggtttcgccatgttgcccaggctgatctcgaactcctgggcttaagcgatcctcccgctgcagcctcccaaagtgctgggattacgggtgtgagccaccatgcccagccctctgtttaagtttcttgaggacgcaccacactgtttgtatagtcgctttgccattctgtagtcccaccaacagtttacaaagggctccaatttccccacattctcaccaacgcttgttattttctgtttctttgaaagtagccatcctggggagtttgctttcaatgcagtctctttttttttttttgcctctgcagagggttcacccagccttcttgtctgtttcaggaccatgggaattttttcacatacacgggtagtggtggtcgagatctttccggcaacaagaggaccgcggaacagtcttgtgatcagaaactcaccaacaccaacaggtttgtggaatcagccttcttatttccttgctgatgcatatctgccgagtcttggttctgttttgggcctcatgtccagcaagtgatagtctcatt[134 bp omitted]cagatggatgaaagcaaacttccctataaaaggccagataatagatatctttttttttttttttttttttttttttttgggcagagtctcgctctgttgcccaggctagagtgcagtggtgcactctctgctcactgcaacctctgcctcctgggctcaagcgattctcatgcctcagcctcctgagtagctgggattacaggtgcttgccacctcgcctggctaatttttgtatttttagtagagatggggttttgccatgttggccaggctggtctcgaactcctgacctcaggtgatcttccctcctcggcctcccaatattggtattacaggcatgagccactgcgcctggctgatagtaggtatcttaatgctgggcctggtggctcacgcctgtaattctcgcgcttcaggaggccgaggctcgaggataccttgagttcaggagttcaagaccagcctgggcaaggtagtgagacaacccatctacaaaaagtaaaaataaaaaaattagctgggtgtgttagcatgtgcctatagtcacagctagtcaggaggctgaggcaggaggatcacttgagcccaggaggttgaggccgcagtgggctgagattgcaccactgcactccagcttgagcaacagactgagatcttgtcaaaaaaaaaaaaaaaaaaacccctccaaaatagattgcttcagctatgcaggtcacacagtctattcagagaacctcttcagctcttgtgtcgtagcacaaaatcagccatagaccatatgtaagtgagtgagcatggctgtgtttcagtgaattttatttgcaaaagtatgtgataggccagaatttgcttggcccctgattacaggatgggggcggacttttccagcataaaaaccatcataaagcccaaaggaaaagacagatttgattatctaaacattataaatatattacataaataaatcctataaattaaaaggcagatgactaggaggagttcttgacatgacacatgatgatagtgtctt[136 bp omitted]cctggccaacatggtgaaaccctgtctctactaaaaatacaaaaattagctgggtgtggtggcaggcacctgtaatcccagctacttgggaggctgaggcagaattgcttgaacccaggaggcggaggatgcagtgagccgaaatcatgccattgcactcttgcactctagcctgggtaacaggagtgagactc[137 bp omitted]tggtgaaaccccatctctactaagaatacaaaaaaaaaaaaaaaaaaaaagcctggtatggtgacaagtgcctatagtcccagctactcgggaggctgaggcaggagaatgtcatgaacctgggaggcggagcttgcagtgagccaagattgctccactgcactccagcctgggtgacagagcaaaaaaaaaaaaagagaatatggaaataatgcacaaaagaagtgcaaagttgtaatcaaatacaaactgaggctgtggtgagatactatttgtttcccctataaagttggccaaaaattctaaaatgttgacataggtcaggggtaaaatagcattccactgttggtagaaatacaaattggaaccatctttctggaaatctcttctgcctgtttgtatgaagagctttataaatgatctattcttgtcactctaactccgctttgaaaaatgtctttaggagacctctggctaggtaaaaatgtaagatgtaatgtttttcataccattatctaaaacaattggcacatagacacacacacacacacacacacacacacacactctcacaaagtcagtaactaagtacctaaaaaagacatgggccatgggtggtgtgtcacatgcctgtcgttccagtactttgggaggctgaggtgggaggattgcttgaggctaggagtttgagacctacttgtgcaacataaaattatgaaaaattaaaattacaaaaaagaatttcaaaaaagttagctggttatggtcgtgtgggcctatagtcccagcttgggagccggaggtgggaggatggcttgagcccaggaggctgcagtgagtaaggcgtgatcatgccattgcattccagcctgggtgacagagtgagacaccctttctctttttgtttgttttttttttatatgtgtgtgtgctttgttttgttttttttgaggcagggtctccctctcttgtccagggtggagtgcagcagtgtgatcgtagctcattgtagcctccacctccttgggctccactgatcctcccacctcagcctccagagtagctgggactataggtgcatgttaccacgcctggctatttttttttttttttgtggagatggggttttgccacgttggccaggctggtcttgaactcctgggctcaggcaatcctcctgccttggcctcccagagtactgggattagaggcgtgagccacggcacctagcaaccctgtctcaaataaatagtaggctgggtgtggcctattttataaattatacatatataactttgaaatattaaatttttttttttttttgagacagaacctcactctgtcacccaggctggagtgcagtggcataatctcggctcactgcaacctctgcctcccagactcaagcgattctcctgcctcagcctcctgagtagctggaattacaggcacgcgccaccacgcccggctaacttttgcatttttagcagagacggggtttcaccatgttggccaggctggtctcgaactcctgacttcaggcgatctgcctacttcagcctcccaaagtgctgggattacaggcctgagccaccactcccggctcctgtgtttccttttttggggggtacatcctcacctataatgcgtggggtcctgactctccctgcagggcgctggctctcaactgctttgctcccatcaatgaccaagaaggggccgaggccaaggactggcggtcggggaagccggtcagggtggtgcgcaatgtcaagggtggcaagaatagcaagtacgcccccgctgagggcaaccgctacgatggcatctacaaggtgagtgccccttgaggaggccgggggctctgtccccgccggggctgcctctgatggagctgacgctgatgcccgctctctgcaggttgtgaaatactggcccgagaaggggaagtccgggtttctcgtgtggcgctaccttctgcggagggacgatgatgagcctggcccttggacgaaggaggggaaggaccggatcaagaagctggggctgaccatgcaggtgtgtctgggatgggggatggcactttgggaggccaaggcggatggatcacttacgttaggagttcaagaccagcctggccaacatggtgaaacctcatctctactaaaaatacaaaaattagctgggtatggtggcgggtgcctgtaatcccagctactgaggtggctgaggcaggagaattgcttgaacccagaaggtggaggttataatgagctgagattgcgccactgcactgcagcctgggtgacagaatgagagtccatctcaaaacaggagcactgccgggctccatgacggctctgacacttcccgcctgggcaccatgtgtcctgcttggaggctgtcatccttgaaggtcattgtgggtcacagaatgggccctgcctgggcttgtggtgctcatgttctggaccgcgctgaacactccaggaggcctcccgtctcgggcccatgcttccctggtttctctctgatccagaataatttccagggccccagctgatggcacccccctagctgtcccatataaatcctccagccagggggtgatgggaacgcgcagatgacatttgcttctccgcctgccgcatctcagagttgaaaaccagacttgcttgtcttcgttctgttggtaaagggatcgctgcagaccagtcaggcatctggtgtcttctgttttcacttcttggctcatcacaaaaaaaaaaaaaaaaaagcagaaacaaaccaaccaaattggtggattccagagagatctggacggaaaaatggggaagatgaatatccccgagccatctctcacctccctgtggcgatgggaactgccgagaacttactcaacaagcggcgcagcatttcagcaccagttaggatgtggtctgtccattgcagggagaagctttacagcagacgaatcgtgagactatttaaggaatcttaattgctgtcgagagcctgatgtcctctacccgagggggtcactcaggttgtcttttgaatggatttgtacggtggggaatttcagaagctgaggaagtagagagaaaaatagtaatgggagagacagcctcagcttctgttgggagtaggattttttttgtttgtttgttttgagatggagtcttgctctgtcgcccaggctggagtgcagtggtgggatctcggctctctgcaacctctgcctcccaggttcaagccatactcctgcctca[134 bp omitted]ctgcctcccaaagtgctgggattacaggcgtaagccaccgctcccagcctttttttttttttttttttggagacagagtctcactctgtcgcccaggctggagtgcaggcatgatctcggctcattgcaacctccacctcccaggctcaagcgactctctcatctcagcctcctgcatagctgggatcacaggtgtgtaccaccatgcccagctatttttgtatttctagtagagacggggtttcgccatgttggccaggctggtgacctcaggtgatccacctgcttccacctcccaaagtgctgggattacaggtgtgagccgctgaccctggccaggattttttttttttttatgactctcatctccattgtaacataaagaatgtgaaaggagctcaaagatttcctgagacactggagagtcagacgtgacttataggtaccttcgaaatggagcgatgatgccctgtgaggacagagagggcccgagtcctcagaatcaccagagtttggccagctaaggccctggggtcaggtgttcgtaagtgaagtttctggggaaacagtcatgctcattcactgaagtagcctgctctcagcgcttgcagtccagacccataaggcttgaaaacattcaccctagggtccctggaagcaaaagtttgcctgccctcatggaaatcgtaaagacaacgagatcttattggtgggatgtgatgctgaacacgtcacccgcgttcgctcacattaaatgcgcttaccccgaccctgccaggtggagcttggccgattatctcctcttagtctcctcttgttcgtagtgaagctttgcgattagacaggattagccattggtcgaggctccacagttaacgaagagctgaatgcacaggcgtcccccccttaccagggggacacttcgaaggtcctcagcacatgcttgaaaccagagagtaccaaaccgttgatgtataattttttttccatacgtttggactggtgattaagtttaatctataaattaggcacagtatgagattcacaacctctctttcgcatcttaggcttctctttagcatttccaaattgtcagcatccctactcttgcactttggggccattatttttatttttgagaccaggtctcgctctgttgtccaggctggagtgtagtggtgtgatcatagctcactacagcctcaaactcctgggctcaagtgattctcctgcctcaggctcctaagtagctgggactacagatgcacaccaccaggctcggctaattttttaaatttttttgtagagaggggatcttgctatgttgcccaggctggtctcaaactcctgggctcaagcgatccccctgccttggcttcccaaagtgttgggcttatttaataaaaattagaatgtttaatattaatattttatatttagcctgtaatcccagcattttggatgactgaggcaggtggatcacttgaggtcaggagttcaagaccagcctggccaacatggtgaagccccatctctactaaaaatacaaaaattagctgggtgtggtggcgggcacctgtaatcccagctactcgggaggctgaggcaggagaatcgagaagctggacaaagggaaggttcacatccctgtgggacgatgcaatgtttcatcatgcagtgtgcgtgatgtgaggtggctgtaaagggggaggaaggggccccgagccgagggatgcagcgcctctagacgttggacacttagaacagtgtgcagtttacaacttaggaattgtttctagaatatttcatgtaacattttcagttgactttgggtcactgaaacctcagcaaaactagataagggaggactaccctgtgctcttcagggggattgggggtcaggtgtgtctggaaacccagacctggcaaggaggctggaagagcgggctctgcatagcgtgtgggccccaagcctgactcacggctgtccctcttcctcctgaagtatccagaaggctacctggaagccctggccaaccgagagcgagagaaggagaacagcaagagggaggaggaggagcagcaggaggggggcttcgcgtcccccaggacgggcaagggcaagtggaagcggaagtcggcaggtgagaatctcgtgggtgtggggtgagcgtcttgtgtgtgggggagcaggtgggcatctcgcgggtgtggggttgaggtcgtgtggacgtgggagccggtggctgtctctccggcagctcgggccacgcgcccctccctcacgcgccccaccctcttccaggaggtggcccgagcagggccgggtccccgcgccggacatccaagaaaaccaaggtggagccctacagtctcacggcccagcagagcagcctcatcagagaggacaagagcaacgccaagctgtggaatgaggtcctggcgtcactcaaggaccggccggcgagcggcagcccggtaggctcgcacggctcactcgtcgccctgatttgcgttgactgcggtaaaatgtgtggggcttgtttcccatgttccccattttcaagtgtacagctcagtcgcactgagtacattcttgtggttgtgcaaccatcaccaccatcaccacctccagaactttatcctctccccagactgaaaccctggccctgaaactgtcactcccaccccctcccaagccttggcactcgctccccagccccggcaactgctccccagcccctgcacccgctccccagctccggcaccccctgccatcctaccttctgtctctgtctcccggggctgttgcaaagtgaccccaagcctaggagtgcaaagcgactcacatctcacagctctggggctgggagcccgacatgggccttgctgggctaaagtcagggcagggatagggctgggccctcctgggggctccaggggagaaccagatttctgcctttcccaaggtctagaggcactgtatccctcggctcggggccccttcctccccctttacagccacagcgcatcttcttccagtctctgagtctcactctcccgccctctctcgggaggacctcggggtgacatcaggccccccgcctcacccaggatgctttcccagctccaggtccttcactcagtcccacctgccatttctcctctgctgtggatggtgacgtctcaggatggtgcaggtctcaggattcagctgtggccgaggccatctcagtggtccctctcttcccatttccttcaggccacattcttcccagggctttctccccagctcccaccctacgctggggcagccccttgcccctagaccttcacttgtgtctctttggtccccgcacttagctccaagcaggaggaggtgtctttcgagtcatccgaggctgggctcctggtggcccgtgtactcagtatgcattgtgtcagtggacaccatgcctctaaatttttttggtgacaggagctcaccctgtcacccaggctggagtgcggtggcatggacaaaggtcactgcctccttgaactcccaactcccaggccacgcctatgtttttaatttattttgtttatttttattatttttttttgagatggagttttgctctcgttgcccgggctggagtgtgcaatggcatgatcttggatcactgcaacctccaccttccaggttcaagtgagtctcctgtctcagcctcccaagtacctgggattacaggcacccaccacgcctggctaatcttgtatttttagtagggatgggatttcaccgtgttggtcaggctggtctcgaactcctgaccttaggtgatctgctcacctcagcctcccaaagtactgggattacaggcgtgagccaccatgcccggcctattttttaattttttgtagagatgggggtctcactgtattgccgggctggtcttgaacacctggctcaagcgatcctcttgtcttggccttccaaagttctgggatgacaggcgtgagctgccgctcccagccaggaacctctcctaaagccctgtcttgactcagtgcagggtgtgcttggtggtgccagctggtcatatctgggtcctgcccagcatcattgaggctggcgcccttgtactggctccgcctcatcctccccaccttgccacttggggtgttggggacttcaggtgaggctcatgcctgttgggcctctgtttttctcagaacggggacgatcatggcccccgcctcctggagtgaaggctggggacagaattagaggacccaggtacatgctcagcaggaagccactgatctgtgggagccctggtcccggtgtctttgccggcctcacacccgcttccctctagttccagttgttcctgagtaaagtggaggagacgttccagtgtatctgctgtcaggagctggtgttccggcccatcacgaccgtgtgccagcacaacgtgtgcaaggtgagtagagatggccgcgggagccgggtggaaggttctggaaggatgacctgacctcccgttcccacatgcctgccactacagacagaggcttgttggctttgctccgctcactctgcagcttttctcggggccctgttgactgctttctgggcagcctgtattaccacggaggcctataacattctcccccaagtcctgtatggtcaaggggccagggtgggagaggatgggccacagtcttggcctaaggtctggagaggaggtgcacatcccctaggggtcaggaaagaaggcttcttggaggaggtggtgttaccaggcagcatcccttgtacctgggacagcaggtgaagaagcctgggtgggaagtcagcagctggggcctgcagtggctctgggcactggggtggtggcctgccatgggctttaaactcaggacaagtggtcagtcgtaggagggacacaagatcccagctgatggtttttttttttttttttttttttttttctgag[133 bp omitted]cgtgcccggctaattttttgtatttttagtagagatggggtttcaccgtgttagccaggatggtttcgatctcctgaccttgtcatccacccgccttggcctcccaaagtgctgggattacaggtgtaagccaccgcgcccaccccgcagctgatggttttcaaaccgattggtttggggccaggacagggtctcttcccccctgtgctgtgggccttggggctggatcattgtctggggtggggccgtcctgggcactgcagggtgctgagcagcatccccggcccccacccactccatgccaggagctccctgcctagtcgagacaatcacagacatccccagacaccttccagtgtcccctgggggcagaactgcccaggtgggcagtgtgggtctgggtgatggtttctctgctgcaacctctggccagagccggcagtcccggtggacaggtgtggaagggactgaccctgccaccccacggatctccccaggcttctgagttgctggcggttttccttccaactgcagtcccgcagtcctctcagccatgggccacacccccgggtctcagaccccgtgtttgttttcatgccaggaggcagctcagggaaggtcaggagatggggtgttcccagtcatgcccatggcatctctgcctcctcgggccccacctgcctcgccctgtggcctgagtcccttcagctgtgtgggcctccctgagtgccctgagtgaggtggcagaaggggtgagaggccatggtgtctttggggctggtggtccgggtctggccatctgtcacctctcaggcgtgcaggcactaatccctccaagcctcagttggccacagtgagaaggggcctggtaacactgtcctggatgccaggttgttgtgaaggtcccggcttagcctctggcaggaaggaggtgctcaggaggtgggcacaggcagagggctggctgtggggggctattggaagagggaggcctgggagccccgtggcggtaggaaggactgtggggacattggaaaccatctgtcctgtgcatcggtgtgaaggcgcggaagcgctgaggatgtgaaggaaggggctaaccagcatcacggtgtccccacaatctgtccttgttgctctgttccaacttgggaagctcagcatcggaggggttctgggaaacaggctgtgaccttccaccttgatctttttaaattataaacttgaggccagccgtggtggctaatgcctgtaatcccagcacttggggaggctgaggtgggaggatcacttgaggtcaggagtttgagaccagcccgggcaacatggtgaaaccccatctctactaaaaattaaaacaaaattagctgggtgaggtgacaggtgctactcaggagactgaggtggtagaatcgcttgaacctgggaggtacaggttgcggtgagctgagatcgcgccattgtactccagcctgggcgtcagagcaagattctgtctcaaaaaaaaaaaaaaaaaattgaaaaaaacattcagagacagcatctcactctgtcgcccaggctggagtgcagtggtgccatcatagctcatcgcagccttgaactcctcgcggggctaaagagatcctcctgccttagcctcctgagtagctggggctacaggcatacaccaccatggccaacatgatgaaaccctgtctctactaaaaatacaaaaattagccaggtgtgctggtgggcgcctgtaatcccagctactcaggaggctgagac[139 bp omitted]tgactgtgctgtggtcaccaggcctctcccccatgtggtcaccgccctcgcccagctgtgtgacgacatgctgcagacatgtgccccctgcgtaggcatctgtgcacctgtgtacggcgtgtcactcctccctggcgtgcagccagcccggtggcatcttccctgtttgtctgcttgggaagtggagactccaggcctctcagctctgtcttctcctggctttcttccccaggcacgacttggttgattgagcttgaagttaggaatctgaatccaccagacttggttccttcctccttttcccctttcttctcattgacgtgtatgtttattttttatttttttcgagacaaggtcttgctttgtcgctcaggctggagtgcaatggcgtgatcatggctcactgcagcctcagcctgcctccctgggttcaggtgatcctcccacttcagcctccggagtagccacgcccggctaatttttttgtttttgttttttctttgagacgcagagtcttgccctgtcacccaggctggagtgcaatggcgtgatctcagctcactgcaacctccgcctcccgggttcaagccattctcttgccttagcctcccaggtagctgggattacaggcatgtgcctggctaatttttgtatttttagtagagacagggtttcaccatgttggccaggctggtcttgaactcctgacctcaagtgatctgcccccctcggcctcccagagtgctgggattacaggcatgagccacgatgcttggcctgatgtgtgtgtttattaagcatctactgtatacactgtgcttggtgttgagagagaacacagcctcaaagctcagggagcatctgccctgttgtagataagataagcacattaataatatataacacggctccacaggtggaaggagaggtgccgtcttgaaggcagatggggtgaggggatgggactgcctctagggaggtgtcagggaaggccccataagggaggtgacttgagctgagctgtgagtgatgagagccgggggaccgagctgttaagctgcatgacctgccagggacaaaagcctggaggccgggtgagcttggaatctttgagggcccctaggggggccaggctggtgatgggcagcaggtggaaagtgagactgaaggtcagaggggcctctggacctggtgagactgtccccacagtcctgggagaggtggccaggagcaaacctgatggtgtggatggcacttctcacgcgcctgctgtgtcttacaggactgcctggacagatcctttcgggcacaggtgttcagctgccctgcctgccgctacgacctgggccgcagctatgccatgcaggtgaaccagcctctgcagaccgtcctcaaccagctcttccccggctacggcaatggccggtgatctccaagcacttctcgacaggcgttttgctgaaaacgtgtcggagggctcgttcatcggcactgattttgttcttagtgggcttaacttaaacaggtagtgtttcctccgttccctaaaaaggtttgtcttcctttttttttttatttttatttttcaaatctatacattttcaggaatttatgtattctggctaaaagttggacttctcagtattgtgtttagttctttgaaaacataaaagcctgcaatttctcgacaaaacaacacaagattttttaaagatggaatcagaaactacgtggtgtggaggctgttgatgtttctggtgtcaagttctcagaagttgctgccaccaactctttaagaaggcgacaggatcagtccttctctcgggttctggcccccaaggtcagagcaagcatcttcctgacagcattttgtcatctaaagtccagtgacatggttccccgtggtggcccgtggcagcccgtggcatggcgtggctcagctgtctgttgaagttgttgcaaggaaaagaggaaacatctcgggcctagttcaaacctttgcctcaaagccatcccccaccagactgcttagcgtctgagatccgcgtgaaaagtcctctgcccacgagagcagggagttggggccacgcagaaatggcctcaaggggactctgctccacgtggggccaggcgtgtgactgacgctgtccgacgaaggcggccacggacggacgccagcacacgaagtcacgtgcaagtgcctttgattcgttccttctttctaaagacgacagtctttgttgttagcactgaattattgaaaatgtcaaccagattctagaaactgcggtcatccagttcttcctgacaccggatgggtgcttgggaaccgtttgagccttatagatcatttacattcaatttttttaactcagcaagtgagaacttacaagagggtttttttaaaatttttttttctcttaatgaacacattttctaaatgaattttttttgtagttactgtatatgtaccaagaaagatataacgttagggtttggttgtttttgtttttgtattttttttcttttgaaagggtttgttaatttttctaattttaccaaagtttgcagcctatacctcaataaaacagggatattttaaatcacatacctgcagacaaactggagcaatgttatttttaaagggtttttttcacctccttattcttagattattaatgtattagggaagaatgagacaattttgtgtaggctttttctaaagtccagtactttgtccagattttagattctcagaataaatgtttttcacagatagacttgattgtgtcttcctatttgcaaactgcctttggagctttctgtctacttttgtgcactattttacaaaaatcccaggagaaacatgaggcaggtggcttcagccccactttacagatgagaaaactgagacccaggagatgacggtgacgggctgaggtcctaaccgcagcctgggaggtgctgggctgttcactttgcagcgtcaagttgcaggggtcagcaaacgacagccaatgggacccaagtcaggacactgcctgtctgtaaataaagttttattgacaccaccacacccatttctttatgtatatagtggcgtttacgctaccatcagcagaactgagtaggtacagcagaaaccatctggaccacaaagctgaaaaatactcactgcctggccagcaaagcttgctggtctcttctcttgggaggatgacttgagtgtaggagtctgagaccagcctgtagaccccaactctacaaataaataaaaatattagccaggtgtggtggtgtgtttctgtagtcccagctactcaggaggttgaggcaggaggctgattgcttgagccccagagctagaggctgcagtgaactttgattgcaccacggtactccagcctgggcaacagaatgagatgctgtctttaaaaacgttttaaaaaaaaaaaatcgggacggtaaaggggctgcgtcttgcagattaattaattcacatcaacctattactggtgccttttattgatggttaagtaaccatatgggcagatttgttttgtttttgagacagtcttgccctgttgtccaggctggagtgcaatggtgtgatcacagctcattgcagcctccaactcctgggctcaagtgatcctcccatctcagcctcccgagtagctggtaccacaggcatgcagcaccataactggcaaatttaatttttttttttttttttttggagagacgggatctcattctgttgcccaggctggtctccaactcctgtgattaggcgatcctcccatctcagcctcccaaagtgctgggattacagacgtgagccaccacgtgcagcctggagtttctttttgaggtggtaaaaatgttctaaaattgatggttgcacatgtctgtggatatactaaaatccacagaattgtgcactttattttttatttttattttttcctttttttttttttgagacggagtcttgctctgttgcccaggctggagtgcagtggcgtgatctcggctcactgcaagctccgcctcccgggttcacgccattcttctgcctcagcctcccaagtagctgggactacaggtgcccgccaccacacccg[180 bp omitted]ttataccagaaatatgtcaagtgtgaacgtgaagataagattcccagttcttgaaggaaactccataaatgtccccagtgggcccttcctagaaaacactaaagtgggttcattgttgagattgctgccttctttttgatttttctctccctttaaagaacaatgtcatgtttaaaaaaatgagcaaaacccagaaaagtatttgtggaactgttttgccaccgactctaatcttgggcatatttctttcctggttcacttaaaaaaatttctttggccgggtgcgatggctcacacctgtaatcgcagcactttaggaggctgaggtgggcggatcacctgaggtcaggagtttgagaccagcctgtccaacatggtgaaaccccatctctactaaaaatacaaaaataagctgggcatgatggtatgaacctgcaatcccagctacttgggaggctgagacaggagaatcgcttgaacccaggag[144 bp omitted]gtgtcatcatagctcactgcagcctcaaactcccatgcgcaagcaatcctcctgcctcagcctcctgagtagctgggactactacaggtgcaaaccaccatgcctggctacttttttaaagagagagatatatattttagtagagagaagtctcactttgttgcccaggctggtctggaactcctggtctcaagccatcttcctgtctgggtctcccaaagtgctgggattacagatgtgaactaccatgcccaccctaaaaatctttaacagctctatggagataacagttcaggtaatataaaggtcacccttttaaagcatacagttcagtggttttattttactgtgttgtttttgagacagtctcgctctgtggcccaggctggagtgcagtggcaagatctctgcttactgcaacctccccctcccgagttcaagtgattcttctgcctcggcctcccaagtagctgggattacaggcatgcaccaccatgcccgcctaattttcatatttttagtagagacagggtttcaccatgttggtcaggctggtctcgaactcccgacctcaggtgatccactcgcctcggcctcccaaagtgttgggattactggtgtgagccaccatgcctggccagcttagtggttttagtatagtcaatacagttatgcagccatcaccaccatctaattacagaactttaacatccacacaaaaagaaacctcacacccttccgcagtcttgccctgtgtccctcccccaggccctgcaagccacgaatcctctttctatccttatggatttgcctgtcctggacatttcatataaatggaattatactgtattttgtgtctggcttctgtcactaaggatggaattttcgaggttcatctgcattgtagcctgtgtcagagctttattccttttcatggctgagtaatattccactgtacggatgggccacctttctataatccccgtttgacttgttttaagatgtagtcttgctctgttgcccaggctggagtgcagtggcataatctcggctctacaacctccacctcctgggttcaagtgattctcctgcctcagcctccggagtagttgggattacaggtgtgcaccaccatgcctggctaatttttttgtatttttggtagagacggtgtttcaccatgtt[133 bp omitted]ggcccaggctggagtgcagtggtgtaatctcagctcactgcagctgcctcctcctggattcaagcaattctcgggcttcccctctctagtagatgggactacaggcatgcaccaccacacctggccgatttttgtactttttgtagagatggggtttttgccatgttggccaggctggtctcgaactcccgggctcaagtgatcctcctgcctcagcctcccaaagtgctgggattacagccactgcacctggcctcccatttcaatttgttaatgcagcagaccaacccataaggggaggggcatctattgaagcattgaacatttttgcgctccacaccttgcctgtctagaaagattgagggagaccagtcagaaattgagcattgggcctgctaactgggggttccttgacgtctgaaagccaagccaagcctcctggtcttgtttagggggaggtccccaagcattccctgccccagtcctttgtgagatttgcatctgactgcaaaggatggaagaaaaccagggcaattaggtgagtgttgcctaaattaatctgcccattaaaatattctaaagagcatttccttcctttttggaggatgaggacttctacttatctgacagcaattctagtgtgtttttaacattttaatatgaagagtttccaaaacttggaaagaatcggatttggaaagaatcggatggtgaaccctcagacctaccgtctagattctatgatcatgttaagtttttctcataagagatggcatgaaaactttgtctaagcaaaataaagtggagaacccatttgggttcctcggttaaaaacatttatattgtctgtgaaatctaaacaccccccactgtctcagagaatatacttggaagtagaacaaaaagccctatgtatgtggtacgtggggtggggactctttcccttcatgattgcacttttttttttttttgagacagggtctcattctgttgcccaggagtgcagtggtgtgatcatggctcactgcagcctcgacctcctgggctcaagtgatcctccctcagcccccagtgtagctgggaccacaggcatgtgcccgcacaatcaactcggtttttatttttagtagagaagaggtctcgctctgttgcccaggctggcctgaaactcctgggatcaagtgatcctcccaccttggcctcccaaagggctgggattacagatgtgagtcactacacccagcctgggcaacagcctgtttttaaattttgtttttactttttattttgagacggggtttgactctgtcacccaggctggagtgcagtggtgtaatcaacggctcactgcagcctccacttccccgggctcaggtgatcctttcgcctcagcccccgaatagctgggattataggcgcgtgtcaccacgcccaacttttgtaatttttttggtagagacggagtcttgctatattgcccagcctgttctcaaactcgtgggctcaagtgatctgcccatctcagcctcccaaagtgctgcgattccaggcatgacctgaaattaaatctcaactccatgtggaatatatgaatatggtcccataagaatttaaaacacccagagcttcttaaattctcctttgacttctctttttaccagtgtgcagctttccttctctccccaaggattaagttcgtttcttcagtttaggagtacctttttctgtgcattgacaagcttgtgtgctcttaacctcatgataccggtttctgtgtgtgtttccatatttattttattgagtacaggattctggaccactgtccctagctcagcggttgggagatatttcatgtttgcaaacagatcggccttctcttttttcttttctttccttttttgagacagagtctcaccctgttgcccaggctgaagtgcagtgatctcgactcactgcaacctccgcctcagcctctggagtagctgggattacaggcatgcgccaccatgcctggctaattttgtatttgttaatagagacaggtttttgccatgttggccaggctggtctcgaactctggacctcaggtgttccacccgactcgacctcccaaagtgctgggattacaggtgtgagtcgcccgagccacagcaccgggcctggcctccttttcaattgctacatagtaagtattccagagtactgattgctattaagttacttctctaatcccccactgatggatagttagtgcaaaacattggaaacagttgcagacagccctgccgccggcattcttgaattgtgtaagctccagaccttttttctgggtacatcacctccaggaagaactgctggctgggttatcgggtggtggatgcacttagaatgttattagaaaatgtcaaattgcccaatttacactcctgccactccaaatgggggcatgcctcacacccctgcgtggtccagtacacaatgaatgctcattttgtgaagtcacagggtcaaatctttctccgtgcctcatcccacttaatccttgcaacattctcaagaggcgggtagacggggtgtggccactaccatcatatccattgcacagttggaaacagactcagcgaggttactttgctggaggtcaaccacagtgaggcatggggcccggcttagctttgaatccaggtcagaaagcaccaaagctcattctctcccatacattttagggaactcggggagagggaccctaactattccgaaggccttgccccttggcaaaggtttgttgattgtgatgggaatagacctacggtggcggggtggaggctcttgctgctttaccctatgttctcggttctcctcctttgcaaaacggatcgctatgtctccttgcttggcactttgcaaattggggaacgctaagcccacattccggccacgggtttcgaacctccagcctgcacgttcccggccggtgctgatgctgtgctgggtctcacgtactcagccgccgcctgataaccagggcggggcccggagcttgcgggcagtgattggcacctgccccagcctgtccgcgcctcgggctggcccctcaagccaatactggctcctctctgtgcggtcgtcgggcgggccctgaggctcccttgtcaatccaaggcccagctgccgtcgggttggtcgcggcagccttggctggcgtgcgccccctccaatgagaacagagccggtcagcgggcacgtgggtgggcgccggcgtgtccccgccggtctgccaatgaagaggcgaggccggcgtttgtccccgcccaatcgcggcgcgcggtgggcgggccgtgcggtgttgatgggcccggcggaggggaggggcggagctgtcagctccggccaatgggcgctcgggcgtggatccggcagccaatggcagtcggggcggagctggcgcgcggccttataagcccccccgcgagcgcttgcggagggctcggtcgccagcaaccgagcggggcccggcccgagcggggcctgggggtgcgacgccgagggcgggggagagcgcgccgctgctcccggaccgggccgcgcacgccgcctcaggtgagcccacggggaggccgcccggccgtgtccgagcgcggaccccgccgccatggccgcccccgcgtcgcggctcggggctgcgggcgcgcccgggactcgaggcccaggcctcgggcgcggcctgctcgggccgggcctcgcgctttgtccgggccggcggggcggttggggcgttaaccgcccggcccgggggcgcccgctggttttcgggcgggggcggcggggccggacaatggcggggcgcgcccaggggcgggagcgggggccccttcccgggccgggggcgcgcgggggctgggcacagacggccccggcgccccgcacaaaagatgacagcgtgggtggccccggccgggcccttttatcacccgggacaagcctcggcctattattattattatttttgaaagaaagcaagaaaaaggaaaaagaccccagcccctgggtaacccccgcctgcgtttctggccctttgggcgccaggggggctaaggggaagccccccagctggacacccagggatgccccctaaatgcctatcattgctcctgcactgcccccacctccggtcaacctgctatgccttggtagcttccaaacttgcccccctgtacgtacccgaaacccccaccccgccataagcatatgcaatctggattttagaaaaaaatcatcttgctatgcaacggcagcctccacgagtctctccgtccctcccccttccagcctgatcgccatctcgaacgaagcccctgctctagagaaatgaattgaggagttgcttccgccgagaccccttttctgtgtcccccgtggacatccccctgggagctggggacggactcgctctgaaatctgcttgacctggggtctgccagggcccaggtctgcgctcagtggtggccatgacaatcaggcaggacgggggactctgtccacctgggcacggtggaaggttttaaggggcatgttttccgcccctgggggcagtggaggcatggactgcttttgggtgcatcccatctgtttgcttgggggaggatgcttctgttttaataatttaccagcaccctgtgaggaagtgttccccgagttgtgaaactagtgagaaggtggttcagctccgtggagcctagtgatcctgtcatatgtgaagagcgtctttttccatgtgtttctggctggggcgtgtattcagcaagttcctttgggtcccaccgggtgcctgcactgtcttgggatctctggatactggactgaattcaagggatcggtgccctgccccagtcctctgcctcaatggccatttatcagaatgtccccgggctggagaatgctcctaaaaacagcaccagtcctaaagcaggctcattagacgactcctatgggcttttatcactgccgttatgggagctaatgactcccctaattctccaataatagcttccttatgagccaccaggagggtttgtcaacacacggggtcagccttctcctgcagcccctgctgaagcagtgggcatcctctctccgctttgcagtttatgttttgaaaccctgaaggtcggagcgtaaagccgtggtagagtcaacttctgtctgagccgaggatttctgggacttgccagcctcgtctccgtgtgtctgattggacacctggcaggtccgggcgctccccctccttgagccggcgacaccaggacgggtcagactgtcctggcctagaggaggtcaccgctggggaggaaaagggggtaacggagattctgccgcacagacgggtgtctgtgtacaggctgttttggtggaagcgtctactgtgtcaggagctgcgggtgcctgcgtgtgcacgtgtgtgtttagttgctgagacctgaaatatatatgtcttagtaacaatccgtttgctcgcattttctaaccctttcctctttggggagggggctgctaacaagatgttaactgctggcgcttaaaggtatagctgatcagccaccgcacagcaccccgcctggcctttgttgtacttttctgtctcgtggaagagacccttcctcagcctcctgccctgtcttcagtccctgtcccgtcctgcaggagccctctggggtggccaggggccgtcctctgtgtccttctctcccacctgaccactctgcctgtactttaattcctaatttctctgtctcctctgctggtttcctgcccgtttgtcctatgccccacccactccctgatgagccggggaggagcctcagctctggggaagccatctgtcctcggttccatctgacacctgtggggacgtgccttggggtcatgcgttcacctggtctggggctgctaggtttccagtgccgagtgccatgccgggacaggttgggaggagtccctggctcctgtgggtttagagtgtagtgggggaaagggtgagctggctgcccagggcctggtcacagctggaatggtggtgtgcagtccgctgccctcgggcccagctcagggagcaggcaggaggaggcgaggctgttgagggcctgaggtgcatttgtaggtggctttgttccctggatcggggagcggaattgggggttcagagctgggtgaccttgacccagtcacttgctcagtgacaaagcagatcgggggcactaaatctttcggagcccactgggcaggaggggacggagagcagatgaacagggtgggggctcggggcggggggagctccgcaggcctgcactggtcaccgccatgacagatcggccgtcctcatccacagcctcaccctaggctcctggctcagctccagggacctgccatgaggcagctcgatggggtcttcagatgccacagccctcccccttcctgccccaggggtctctgttcctggcttaggatgccggacagaagagcaggggcccagcctgggctccgttctcatctggtggtcttgacgacgtctctggatctctgccctctgtcccatgccccacacaggcttcagagttggagagacctggattcagatccctcctctgaggcagtcacttcccctctctgggccttgctttcttctctgtaaaatgggtgtaatgggaacacctccctcccaggtggttgtgaggatcaaagcgggtaaaaggcgctgaagcttgcagggtgccaggagctctgagttcggagccggtttattacacagcaaggccctctgccctgtcagggtctccccacctctgccctatccacgttctgggctgggacattctgtggcggggctgtcctgggcaccgtagggtgagtgtgaacaatatccctgaccaccacccaccagatgctagtagcaccctgtcccctaagcggtagcaaccaaaaatgtcccctgggaagcactgtcaaccccgcagtgagaaccttggacttggccttcagccctgcagtagctcatggtgtgctgtgaccgtgatgggcctcagctccctttctttcctccccactcaccctttagcagtgagtgactcctatttgcaaactgtgtcccggacacactcctcacctggttgttcaggttctccgtgactgtccttctgcccttccagggtggcagcttccacctgagaggacaggagcccccacggggtcccctgcacgccctgcaatgaggggcagcccggcatctgtggggtcttctgggctgctctctggcctctgagctccgggtcttcctgggctgctctttggcctctgagctttggcaggtccttgcccaggcttgcttggctgcccccaggggtggcacttccacaccctcccagtcaccatagccctgacctgtcgatttgccagacagttttctttaagtccatttaaaaatgactcacctctttgatcttggcctcttcctgaacagtaatgtccccagagttgtggaacgttaatgtgctagttgcacatacttttatttatttattttgagacagaatctcactctgtcacccaggctggagtacagtggctagatctcagctcactgcaacctccgcctcccgggttcaagtgattctctggcctcagcctcccgagtagctgggattacaggtgcccgccaccacaccctgctaacttttgtatttttagtagacacggggtttc[133 bp omitted]caaatgagcttaaccactatattaaaaaaaagaaaatttgtatcttcccaaatactgaggggggagtggattgacgaattgatgtttcttggtttttggacaaattaattttcaagctcactccctgcgtgactggcctgttctaggatgctggacttggttagatctgggtccgtctattccctcctgctcccttgaggagctcggaaaatggccttccctgttggggcggggaacatgggaagtctctacctcctgcttagttttgctgtgaacctaaaactgctctctgaaacaaagcatattaaaaaaaaaaaaaaaaaaaaactggctgggtgcggtggctcatgcctgtaatcccagcactttgggaggctgaggcgggcggatcacctgaggtcaggagttcgagaacagcctggccaacatggtgaaacctcgtctcttctaaaaataaaaaaattaactgggcgtggcggtgcacacctgtagtcccagctacttgggagactgagacaggagaattgcaccgagatcctgccactgcactccagcctgggtgacagggcaagactccgtctcaaaaaaataaataagtggccgggcgcagtggctcacgcctgtaaagccagcactttgggagccaaggcgggcagatcacaaggtcaggagatcgagaccatcctggctaacaccgtgaaaccccgtctctactaaaaatgcaaaaaaaattacccgggcatggtggtggccggtgcctgtagtcccagctactcgggaggctgaggcaggagaatggtgtgaacccgagaggcggagcttgcagtgagttgagatcgcgccactgtactccagcctgggcgacagagcgagactccatctcaaaaataaataaata[131 bp omitted]ggccaacatagtgaaatcccatctctacaaaaatacaaaaatcagccgggcatggtggtgggcgcctgtagtcccagctactcgggatgtgggggcacgagaatctctggaacctgggaggcagaggctgcagtgagccaagatcacaccactgcactccagtctgggagacagagcgagactctgtctccaaaaaaaaaaaaaagaaggtagtcaaaggagtaaaaaccaaaacaaacaaacaaacaaaagattttcccctgctcagaaccttccggtgacttcctgttgcccttgggaaaaattctgggccctttcgcgtggccccttcgctctgtcatctgtggccttgtccttccttcctttcctccctttcttcctcctgcacctgctcctttcctggcacagccgccttccctgcccgcccttccctgccgcaggacctgtgcacttgctgtgcccgctgcctggttctctttccacccagccggctccttatcactctagtcacttcccttccctacttctcctcctttgcatgtcacacgatcagagctgggtattagtctgtttgtgtatctgtttgtctcatctactagggcaggggctttttctggaagggccggagaataaatatttttggctttgtaagccagaggtcatctctgtccagaccactctgctttgccgttgtagcaagaaagctcccgtgggcgagtgtgcctgtgtttcagtaaaactttatttatggacacaaacgtgaattccgtgcaatttttacattataagacatttttcttcttttgctttttttttcctccaacgactaaaaaatgtcaaaaccattcttagactgcaggctgtacaaaaacaggtggcgggcaggattgaacctgtgggttgtagtttgcaaatacctggctagggtgtgagggccacactacggaaagctatggaaaccatgtcagcctcacgacccctagaatgtacggcagctccttagacgtggtgggtgttgagtggacattccttgttgagtgaatgaatttttttttttttttttgagacagagttttgctctgtggcccaggctggggcgcagtgggctgatctcggctcactgcaacctccacctcccggattcaagcgattctcctacttcagcctcttgagtagctgggattacaggtgcatgccaccacgctcgactaatttttgtatttttagtagagatgggattgcgccat[264 bp omitted]gaccaatatggagaaatcctgtctctactaaaaatacaaaattagttgggcgtggtggtgtatgcctgtaatcccagcttgttgggaggctgaggcaggagaatcgcttgaaccctggaggcaggggttgcagtgagctgagatcacgtcactgcactccagcctgggcgacaagagggaaactcagtctcaaaaaaaaaaaaaaaaaaggtcatgggtcatttcaaggatccttaaaactgcaggaatgtgagaaaatgcgatgctgacatccacccagacagcctcaccataaaggagggaaaaaacagctacaaacagtgtaggtggggggaacgcttcgctgtttgagacgccagactctcttgctctgggattcacgcggctgcctttctgttacagctcaccaagcgtcagaagcacgtcgagccgtgtactcggcccaaggagttcagtgtgacctggcaggaactgagggtttgtttaaaaggaagacagcattgcacaatttcacaaggcttttgttttgtaagcatcggaactctcctcgttaccagtgctagcgcccccgatgggaggggcaggggagtcgcagatggtggtttctgctgtccctgagcacagaaagcctcatgagggaggtggcttatccagtgcagagctcagctttgtagagtgagtggacaagtgcccgtcggtggccatcgtgcggtcagtagccgagtgggggactgtgcccggccacacttcctttgtctcactcttctcctggctgacaggcattttctgagccaagtaggtctttggcatcttagatttgggcctgtcccaggaacgttctgacttgtcaagaaatcgtaccgttaatttacggtcatgctttctttccttgattgaaataaacaatctggagaggcttgctcagaatttcttggctttcaaaagttgcctgtctttttttctttttctttttcttttctgttttttttttatttttgcttgccccctctctctccctgcttctctggctcttcctcccttccctctttcttttctttctttatccacctcagtgatctcagcaaacacgaggggatggatgacaagtttgcgtccagccatctccgccctgctggcaggctgtgcctctttggcggtggccgagcgcgaagttgctctgtggctctggactgggatcgtgtttgttcaatggacaaaggctgagaatcccgaggccgactgcccagtggctgctgcacctcaagaccccgagggctctcaggtgcacagtgacagtcactcacgcagacctggccccgtttgctggtaggcgcgaccaccgttgtgtttttcagacaagcctgggtgacttgctgtgaaaacgtcagctgagggcacggtggcaggatttccccctgcatagacctcccgtcagcattcatagctggacccaagtgctggcaccttccgagccgccggcagtggcggtgggcctgtttgcgtttttgcggctgccctagtctccagggagagagcgtggagacagacgatttgtatgagattagccggccgtggattcagaatcgctctttgtgtgatgggtcccaggggttccttttgaccacagagccagcctgaaactacccacgggtgctgtggaccccttgatcatggcgggatggaaatgggctgtgccctcagccgggactcaggactgcagcatgtctgggcagcagcctggaagctggccagcctcggcgcccttggggacagcccttgacactctggctcggtgccctgagtgagggggcgccaccctgggctccctgggatgcgagcaggacccaagccaggctgctggaccgggacagtcgcgtcatgttgctgttgtccccttcctgcagcatctccatactctcctaaaatcccatctgtcagacagtgttggctgtaggcagagcgggcctcctgtcttgcagtcgggccgcgtggatctgattgtcttgctcaggagagagagaagattgccgtccctagcatgcacttgagtcaagcctctggaatttcaactcctgctccctgctctattccaactgcttcccccaggaaggggggacgaggcggaggaagtcgttctcttgacacccctagaacataaggcatcttggccaggcacagtggctcacgcctgtcatcccagcactttgggaggctgaggagggtggatcacctggggtcaggagttcaagaccagcctggccaacgtggtgaaaccccatctctactaaaaatgcaaaacttagccgggcgcggtggcacgtgcctgtaatcccagctactcgggaggctgagggaggagaatcgcttgaacctgggaggtggagg[138 bp omitted]gtggaagccacagaatttttttggcccctctagccacgggtgtcctgcgtaccccaaaggcagagcagagcctgcttctcagctagagcctgaagggcagctgccgttcatcaaaacagctcctgtgcaattctgtgcctgtcgctggctcaggggcgcgggaggagggatgggctgcagcgagcgggtgtggtcaggcccaggctggtgcgtggtcactgggagctcgggcagcatggctgtcactgtagccacaccctgggtccctctgagtgggtttgcattgtccagctccgcgtgagagttgtcaagttcatgcgtgcctggtcaggggcgcagggtggccagatgaccagtgtctcctgcccgcagggcctcttggtggaaggagatggagaataactgccaagaggggtagaaaccaagcctggaggccggatggctgtaacccagcactgtgggaggctgaggtgggaggatcggtggaggccaggagttcaagaccagcaagggcaacatggcaagaccccatctctacaaaaactagaaaaaatttgccagatgtggtggctatgtctgtagtcccagctactcgggaggctgaggcgggaggattgcttgagcccaggagtttgagcctacagtgagccatgattacaccactgcactccagcctgggcaacagagcaagaccatgtctcaaaaaaaccccaaaaaaccaagcccagggaagcacagggcagtgcagtgcgccgggaggcttcccataggaactgctgtttgcgcagagccttgtccattgtgggaactgtcacagatgactgtgagcttgagagcagaggaagtagcgagaggaacttgggggtgtggcctgggagatctgagaggggatggggtcagggtgaagcccacctggcatgctggaggcagctgggcacccaggctctggggtgtctctggaggtgttacccgaaccagtgtgatcatggggacatgaggcagcaggcagccccgtcctcgaggagctcagagtctagttggcaagtctagaagccattcctgtcaccagggagggccacctcacagttgcccaactattggcgtcagtgtgctggccaggttctgaattttctaggacagcctcccttagaaatgatcctgccattttaaaaaatatatatttttatggagctatcattcacatactatgaaattcatcttcttaaagtatacaattcaggctgggcacagcggctcatgcctgcaatcctagcactttgggaggctgaggtgggcagatcacttgaggtcaggagtttgagaccagcctgggcaaaatggtgaaaccccatctctactaacaatacaaaagaattagccaggcatagtggtgcacgcctgtagtcccagctacttgggaggctggggcatgagaatcgcttgaacccaggaggcggaggctgcagtgagctgagatcatgccactgcactccagcctgggtgacagagcaagaccttttctcaaaaaaaaaaagatacaatttagtggtttttagtacattgacacagttgtgcaaccgtcaccactatcaaatgttagaacctttctattattacacaaaggcactctgcctccaccagtggtcactatccatcccctcccccatctgctggtacccacacatctctttcctgtctctggattggcctgtcctgaacatttcatagagatggagtcacacactgtgtggcctgttgtgtctggcttctctcagtgggcgtgatattctcaaggtgtatccacgcatggcatgtgtcagagccttgtcccttttctttcttttttttttttttttttttgagatggagtcttactctgccacccaggctggagtgcagtggcatgatctcagctcacctcaacctccgcctcctgggttcaagtgattctcctgcctcagcctcctgagtagctgggattacaggcacctgccaccacacccggctaatttttgtatttttagtagagatggggtttcaccatgttacatggccaggctggtctcgaactcctggcctcaagtcatctgcctgcctcggcctcccaaagtgctgggatgacaggcgtgagccaccgcgcccggcccactttgtctctttacctggctgcatcctattcccctgtgcggggggtgtcctgttttgttttccattcatctcagtgggcatttaagttgttctcattttttcagccccatcctctccccagtctgtggcagagctcagggattcctgtgctgcaccatgcagaatacaggccgagatggccccggggcagacacagcatagaaaccatttgtggggctggggtgggcggggtcagcttggcggatgctgggctgcggctaggctttgaggtgcagtggcccggcgggcctgcaggggtgcagaggtaccctgtgaggccacagggtctaggctccaggtcattagtggcgagtccgcgccacgggcctcttctctcagcctgagctggcgtgcctcagccagtggggccctggcagggacctctctgtgcagccacagggcccctgtgtctccgctccatggggcagcgtggccccagctgaccacagctctgacttgccctttgctgtgtcctgtaaggtcacccctggtgagcaggacccctgagtccaccacaccagggcccgacggctgtcctgtccccctcgtcctgtttttggtgtcaccccgctgtctggttagctgtgccggcctccctgaggggcttgtgagaagatgccagggcctttcttccccagagctgctcccgcgaatccagcctggggttggagagcacgctgctccctgggtcacttccctttcctggtccggggcctggtcccagccctgacagggttgtgagccttaggaggtggccatcaggttctaaatgtgcccctggggcccagcagcctccacctggacgtccccccaggaggttaaaggggtgagtgggagccccccccaccacgccgggccccttgggagtgcaggtgggttctccaggggagcaggtgacactgccaggcaccggcggtgctgtacagtcagcccagtgccaagccccacctcttcccacctgctctgcagtgctctccctgtggggacagtgatgtgcctggggactgtcacctgctctcccctgacagaggatgtgggttacctggggtgccccatcagtaccccaggggctgctgatgaacatgggaagaccccatggcagggggcggtcacgtaactaaacactaccaagtgtcatgtggtgaaggtggacccctgcctcacaccatggccagaagccaaccccacatgtagcagagatgagaacatgttactaaaacgattacaaaacctctagaagagccaggtgcagtggctcatgcctgtcatcccagcactttgggaggctgaggtgggcagatcacctgaggtcaggagtttgagaccagcctggccaacatggcaaaaccccgtctctactaaaaaatacacaaaattagcctggtgtgttggtgcaggcctgtaatcccagctacttggaggctgaggcaggagaatcgcttgaacctgggagatggaggctgcagtgagccaagattgcaccactgtactccagcctgggcagcacagtgagattctgtctccaaaaaaaaaaaaagccagacgcagtggcacatgcctgtaatcccagctactcaggaggctgaggtataagaatctcttgaacctgagaggcggaggttgcagtgagccaagatcgcaccactgcgctccagcctgggtgacaagagcaagactccgtctcaaaaaaaaaaaaaaaaaaagcctctagaagaaaacctggatgtatatgtaaaatgttgtatttcctttttttaaaaaaatttaaaattatttttatttctatgtttttaatggcttgtctgtataaccaaaagtgatgttctctctctctctctctctctttctctctttctttttttgtggcggagtctcactgtgtcaaccaggctggagtgcagtggcgagatctcggctcactgcaacctccacctcccgggttcaagcgattctcctgtctcagcctcctgagtagctgggactacaggcgcgtgccaccacacccagctaatttttgtatttttagtagagacagagtttcactgtgttggccaggctggtctcaaactcctgacctcgtgatctgcctgccttggcctctgaaaatgctgggatgacaggtgtgagtcactgcacctggcctaaaagtgatgtatgttttaaggcagcgctgtccagtgaggatgcagaacaagcccgtgtgtctgaattttctggtagctgagttaaaaggtgaagagaaatgggggaaattaattattacagtgtattgtattgaacccagtatacccccagttttatcatttcagcatgtaatcatcatcttcaaaactgttggtgagatgtttcacactgctttttcttttcttttttttttttttttgggtgctgtctttgacattcattgtgtatttcccctgagagctggccctacgtggttgatcatttggggagggccctggccccggatgcactgagcgtgatgccagcctggtgctatagatggggtcctggtgcttagtggaccagggcccacgctccttcctcccaccctcccaatcctgcccccgcctatcccaggcaggacttatggctctgatggtgtctggctggagagatgagacacacctgacattcaccagcaatggcaggacacgctgcgacaggtgcggctgaagaagagctaggctgtctggcggtggtcctggcctatcttcccagtgggctctcgcccacagtctctcgcctttgccagggagcactgaaccgtggactggtcctgggggccaaggggtcctggcggcccagcctgggcagcgcctctggcatcgcagctggtggggaggcgcagggctggtggggcttaggaggcgcttggcactgaggaggtgtttccgggaagagaatggcaggaagttggaatgcttctttggctgtaggaaagcccagaagagagacttgtggatcagcaccgcccaggaataacatcctatagccacaggcggcttcaaagggcttgagctatcagggcaggattgcgggaggattcgcagcagggaggatggacacccggagacctgctacccatgcacgtagcctgctgggctcagatccacctctcctgggtctgtgtctttatttccaaagtgggggtggctctgcaggtcccgcttcaaggctgggtgaggttaactgaattaccacgcgaaaagcccttggtgaagtagttctcaccccaggggcaattctgtctcttaagggacacctggccacagctggggacatttgtgatggtcaggatttaggagtgctcctggcgtggggtgggtggagggcaaggacactgctcagcaccctgcagtgccccgggcggcctcatcccagggaaggctccaggccagcatccaccgagcggaggctgaggccccaatccagagtggcgctggccaggttgggccccgggaggtcacaggaatgatttttctctgggcttgtttctgctcttgactgtgaatagaggtgctgcactagaagtttctaaaatctttttccattccaagacagcttagggtttatgctgctcttcgtgtttgtgctggaaaggaagttaaggagccgtggaagtgatcataaagcaacttgaaaataatagtttttgcggcctctttattataatggggcagccaggtgggttggccggggttttatgggccaggaagcaggcgtgggggtttctgggggaagctggacccgaggcagcgttgaccccaagaccaggactccgcgtctctcctgttccggcctgttccgtacgcctcgtcaggttttctgctccggtgaacttggagtgtgttggggactgacagatccagagaacatgcccctctgctgcatgatgccgctggggccctcgggagggcttggggtgtgtctgtgggtcttgcaaacactctcctcttggtgagaaggatctggttgcattttgtgcccttgggctgtcccctggctcggacagaggtgtccctgctgtaacccccacttcgcagggtaccagatgccactgcccaggagttactaatgtacctgggggtctggcacctgctccgtgaaacccgaggtctccctgtactaattaatttggcctttagccaaagggagggctgcagccttcgggatctgctgggtcacagtgggtgttaccctaacaagtttcctagagggatgttcattagaaaaataatttattttatggtataaaaattagcaatgacaggctgggcacggtggctcccgcctgtaatcctagcactttgggaggccaaggcgggcagatcaccttgaggtcaggagtttgagaccagcctggccaacatggtgaaaccccttctctactaaaaatccaaaaattagcccagcatggtggtgcacgcccgcagtcccagctactcgggaggctgaggcaggagaatctcttgagcctgtgaagtggaggttgcagtgagccgagatcgcgccattgcgctccagcctgggcaacagagcgagactccgtctcttaaaaaaaaaaatcagcaatgacagtgaagtggaaacaaaacaatacaagctgccgtcatctccagtgagcttccgaggtctctgctccatccatgtggatgtttgggaggggccctccgtgggctccaggcggctggtttagaggtggtagaatgttctagctctgtgaggctgggattcccaagtggagacctgtgatgctgctgggtgacaggcagaggatcctgctgtgcaggctggggctgccatgggaggcttggagcccgagggtggtgaggatggaattaagggatctggccccgcgtgctgtgccgggtgagaggcgggtgtgagcatggcaggaggctttgggggccgaatgtgcagtggaagcctggatggtgagcggatgagctggtgctggaacccagacccgccttcactgcccccagcgttgggccaggaccgctcatcctgtgggcggatggttttgctctgagcctcagcaccggttccaggagcgcagcctgggagcgcggattgggactgtctgtctctggccaaggctgtgtgtgtctcaggaagcctccccggcgcccagccctccacctctgtgtgttctgcaccggccgtctcccggtttttccctcgctgtctgggcctgaaacagcccagaagagaaatcggatctcttctcagcctgagcttctcttttagcctgagctgaaagagatcatcttgggaaggagctccccagcccggcttggattggtcccctctctggtgccccgggggagtagtgatggattcaggacttggtcctggtctgacctgccgtgggggctgtgatggggtcctgatgtgccccgtgtgccatggcgctcgccaagggccagcatgtctgcggcctcacaggggcttcacgagccacattcggggcagcgcttggtttggagtctagagccagagcctggcgtgggacccgagctcgtgaactctgtcagtgccactgacttggggcagtgtctccgtgtgcctccctgtggggcgatggcggagtaaacgggtgatggccactgagcgctggccgtggggactcttggtcctggctgccaagtagaagcttcaggggtgctcttcacagtcagctgactctgctgtccctgatagcagaagacagcgaaggcacctgccccctgccatggcaggtcggcgggcacagaggagggctcgggaggctgtgtcctccagcgtctccatgtttactgtgccaggccaggtgctgaggggccggcgaggaagacgtgaggactggagagagcctggattagggccctcgaggggcggcgctgctttagccgggggaacagggagggcctctcccagcaggtgacattcagtcagagacctctgagcgactcacacctgcccacctttgcaggatttgggacaagagtgctccaaagaagtgcaggcagcacgtgcggaggccccaaggcggaacgaggcgcagctcactgagctggcaggagcagagaggactgcaggggcacagaggccggagcagcagtgcctgctgcctagtcagccgtgagggcaaaggctggaggcactgctgtcagaggtttatgcctttttttatttttattttattttatttttttttttgtgagacggagtcttgctctgtcgcctaggctggagcgtagtggcacaatctctcggctcactgcaacctctgcctactgggttcaagcgattctcctgcctcagcctcctgagtagctgggatcacaggcgcccgccactacgcctggctaatttttatatttttagtagagatggggtttcgccatgttgcccagtctggtctcaaactcctgacctcaggtgatctgctctcctcggccttgtaagagttaaagaaagaggaaagaaacacaaaatgcagctggcagttaaaggcaagttttctttagttaaaacctgagaggcgctcttggccgattgcggtcaggagcgctttctcttatagactaagagtatatattggttttagggtgaaggggcttatcacaagcttggaacgtttctgtgtgtggagaagtttatggcagggctggaatctgtctgggaggaggggaggttatcttggggcagacatcttcccggccggaggggggttatctcggggctggcatgtctctggttggggaggagtttgcgatgtttctggctggagatgctatttgtggtttatggtcatgctgatcttagctgttaggctgataccctttggatttagcggtcttttattaaggtgaacttttagaatgaggggcttgtccgggatggcaatgcttctgctgtcaggcctcccaaagtgctgggatgatgggcgtgagccactgcgcccggccagtatatgtgttttaaagacctctctggtggctgtcaggagtgaaagcaggggacctgtcgggaaactccaggcgtcgcccaggtgattcatggcaatggctcaggagaagggggtctgggctggggctgcggcctggactgggggtggcttttggaggtagacaggataggcctggctggtgggttgaatgtggagtggggagatcactgctactcccagggtgcagcagctggtttcacgcccccagctcggccacttcctgcacagcgatgtggtcttgggcctgagaacgtgggaataacaaactcagtttctcccaggctgtcagagcagtcacagatcccttccagcacacgcgagcaaagcggtgcaggggcaggagctggggccctccgttcagttcactcctacctgggggctgcatcgggcaggacaggctgcgggctcctccccacgtacctaaccccacggcccatgccagtcacaagccccaggctgtgtcctgagcttctgctggacgcgctggaaaccagccttctcatgaacccttctttttttttcttttttgagacggagtcttgttgtgtttcccaggctggagtgcagtggtgcgatctaggctcactgcaagctccgcctcctgggttcacgccattctcctgcctc[187 bp omitted]aacccttctttgagcttaatttgctaatgcacctctcaaaactcaggggagctgttacttacgtttaccagcttattagaaaggattttacaaaggaggcagatgaagacatgtgtagggtgagggatgtgggaaggggcacagagggttccgtgctctccccgggctgtgacgtctccaggaacctccacgcattcatctgtggggaagcttccatcccagtcctccgggttttacctcagcttcctcgcagaggcttgggtgacctcactgcattggcctgggtgatcaagtcagccttcagccacatgcccctcccctcccgtccagcctgggtcttttcagtgagcagccctattccctcagctcccgaggggctgccaagcccttagtcacctcattagcacactggagaattccgaggatctgggggagtcgtaggccaggaaacaggacaaaatgtatttcacagtctcactgggccggtcccttgcctccgcttccttgtctgtgatgagaggacgggagggtggctgtctggacagtgctgaagtggtagaggtgagtcgctgccgtggagggcttggcagggtgctctgtgaagggccctgtggcctggggtggaagccgcttgcagagtgctggttctttgcctaaggatggtggggcaggggggccgtgttcacacgtgctgttggctgtgtctgccagtcttcctttcttttttctgtttctgtttctttttctttgtttttttttgtttgtttgtttgttttgagacagagtcttgctctgtcgcccaggctggagtgcagtggcacgatcttggctcactgtaacctccgtctcccaggttcaagcgattctcctgcctcagcctcccccagtagctgggattacaggcatgcaccaccacgcccagctaatttttttgtattattagtagagacagggttttaccatgttggccaggctagtcttgaactcctgacctcaggtgatccgcctgcctcagcctcccaaagtgctcggattacaggcatgagccaccatgcccagtcttcttcttcttcttcttcttttttttttgtgagatggagtttcactttgttgtccaggctggagtgcaagggcacgattttggctcactgcaacctctgccttctgggttcaagcgattctcctgcctcagcctcctaagtagctgtgattacaggcatgcgccactgtgcccggctaatttttgcatttttagtagagatagggtttcaccttgttcaccaggctggtcttgaactcctgacttcaggtgatccactcgcctcggcctctccgagtgctgggattataggcgtgagccacggtgtctgactcagtcttccttttcatgtcatcccttgttaatttcctttagaaacagtttgggccaggtgcagtgggtggcttatgcctgtcatccaagcgctttggggggctgaggtgggaggatcacttgaggccaggagttcaagaccaggctgggcaacataatgagacccagtctctacaaaaaaattaaaagcttagctgagcatggaggtggcacctgtaatcccagctacttgggaggctgaggcagaaggatcgcttgaacccaggaggttgaggctgcagtgagccacgattgcaccagtgtgctccagcctgggcaaaagagtgagaccctgtccccgccccacaaaaagagggtcagaaccttggtgttagagcagttcacttccacccaaaaacagggacttagaaagggagacacttgtgtggagcccgaggcagacatgccctgacttagcagtgcaggtttctgtactggaatgagggcctggggcaggtggcctctggcaggatgcatctgttacctgagtctgaaggcagcgtggcgaggagatgggagggctgtgcctgggatcctggggccgtggagagctcatctagaggtcatgagtattgggcaaagctcacatgccgtgttttaatactgtcattatggaagttggcctgggggtaatccagtgtctcttttagatctgtgttgtacaaacactgaactagttctggtcgcctctccggcctttgttttggggagaatattcgatgagatggcccgtaattctaacactgtgcattttgaaggatatttataaacccggatggataaggcccttcttagtgctattcttgtgttggttccctttattattttttttaaaaaactttattatgggccgggtatgatggctcacgcctataatcccagcactttgggagtctgaggtgggcggaccacctgagatcaggagttcgagaccagcctgaccaatatggtgaaacctcgtctttactaaaaatacaaaaattagctgggcgtgatggcgggcgcctgtagtcccagctactagggaggggacaggagaattgcttgaacccaggaggcggaggatgcagtgagctgagattgtgccgctgcactcctgcctgggcgacagagtgagactcggtctcaaaaaatagtaaagcaaaaaataaaaataaaaacactgttatggagaatttgactacacagaaaggtagacaacatggaataacgagccccccaggcccctcacccagccccaaaaccatcaacccatggcaaccccccctgccctacccccatctgtggtgaaatagccctcatattatttttgttaacttttaatttttaaagaattacagaggctgggtgtggtggctcacacctgtcatccaggcactttgggaggcagaggtgggaggatcacttgagtccagtagttcgagaccagcctgggcaacacagtgagaccctgtcgctacaaaagcaaaaataagaatgaattatagactgccaaggtgttgcaaaaataataaagagatttccctaggcttcaccctgctgtctccagtggtaacattttacataactttagtgtcccgttaaaactaggaaattgacacaggacactgtggcttcagaccttcctcaggcgtcctcagtgttagcactggctcattcttttggtagagtctttgcgacattctgttacctgcacagattccaggaaccaccattgcaatcaagatacagaactgttctgtcaacacaaaggaacgctctgcttctcccttctgtcacccccaggccctggcgacggctgaggatctctgcatctctgtaaccttgcccttttgagaatgttatgtagatggaatcacagcgtatttaacctcttgggattgggttttttcgcttgcaatctgtcgaagttgttgtgtgtatcagtagttactttcttttattactcagtagttctccatacgggtgttgttttctcattctgcttatttctgtgagacgggtggcagtggtaaggtcccatctttcattcccgattttagcaatttgagttctccagagatggaggacaagatccaaggttgccagggcctgggggcgacagagtggaagcagagtgagttcctttgtgttgacggaacagccctgtatctgattgcagtggcggttccaggaatctgtgcagataacaaaatgtcacgaagacatttaccttcgacagttttactggtcttttcaagggaccgacttttggtttcattggctgtctctattttgtttatttttgctcgttatctttgttacgtactgtgctccatctgccttagtttccgtgtgctcttctttttccagtgtcttaagggagatgcttaaattaatatttgagatcttcctctttttaaaaactgtataggcaattataaatttccctctaagtactgctttagctgcaacctgtactttttttttttccttgcgataggatcttgctctgttgcccagactggagtgcagtggtgcagtcacaaatcactgcagccttgacctcccgagctcaagcaatcctcccacctcagcccaccaagtagctgggaccagaggcatgtgctactatccctggctaatttaaaaaataattttgtggagaggaggtctcactatatttccccaggctggtctcgtactcctgggttcaagcattcctctcaccttggcctcccaaagtgctgggattacaggcatgagccactgtgtctggccatcctataagttttactttgttgtgagttcattttcattcacctcaaaatattttctaatattttcttcctgttcaaccctgtgattatttaggagtatgttggttaatttccatgtacttgtgaatccccaaattactttctgttgttgatttctaatttccattgtggttggagaacttactttggatgatctgaattcttttcaatttaatgaggcttgttttatggactaacatatggtttatcctggagaatgttccatatgtactgagaagagaatatgttctatagattcttttggcttatagtgctcaagtctctctctttgttgctcttctgctagttgtgttatcttttattgaaagtgagggtatgagccgggcatgggggctcatgcctgtaatctcagcactttgggaggccgaggtgagtggatcacctgaggtcagcagtttgagaccagcctggccaacaaggcaaaaccctgtctctactaaaaacacaaaaattagccgagtgtggtggcgcatgcctgtattccagctactcgggaggctgaggcaccagaatcgcttgaacccgggaggcagaggttgcagtgagctgagatcaccccactaccctccagcctgggcgacagagtgagactccatctcaagggaaaaaaaaaaaagaaagtgaaggtattgacatctccagctattgttgaattacttctccttttatttctgtcattttttgcttcatgtattttggggctctgttattagatgcatatatgtttataattgctgtatcttgctaatggattcacctttttatcattataaaatgtccctctttatctctagtaacttttttgtttgttttttttttgagatggagtcttgcacttttgcccagtctggagtgcagtgttgcgatcatggctcattgcagcctcagcctcctgggctcaagtaatcctcctgcctcagcatcctaagtagctgggactacaggtgtgtgttgccacgcctggctaatttttttgaattttaacagaggtgaggtcttactatgttgcccaggctggtgtcaaactcctgaactcaagtgatcctcccaccttggcctcctgaagtgcttggattacaggcatgagtcattataccacacctggcacatttttttttaagtctattttgtctgatgttagtgtagccactccagctttcttatggttcctgtttgcatgttacacgtttaatttttatattttcagcctgttttttttttttttttttttttgttattgttgttttgtcttttttgagacagggtttcgacctcccggcatgcaccaccatacctggctaatttttgtgttttttctgtagagacgggttttgccacattgcctaagctgatctcgaactcctgggctcaagcagtttgcctgcctaggcctcccgaagtgttgggattacaggtgtgagccactgtgcccagcctattttcagcctgttcgtatctttg[133 bp omitted]tctactaaaaatacacatgcgtggtggcgcatgcctgtagtcccagctactcaggaggctgaggcaggagaatcgcttgaacccgggaggtggagattgcagtgagccaagatcatgccattgcactccagcctgggcaacaagagtgaaactctgtctctcaaaaaaaaaaaaaaaaaaaaaaaaaagtgtcccctgaagacagtatatagtatagtatatagttggatcttgttttttaaatccagtctgacaatttctgtcttttgattggatgtttaatccattcatatttaatgccgttattgatatagttggatttgtacctgccatttccctttttgttttctattttgttcctttattccttctttgatgttttcttttgcattaagtgaatattttctagtgtaatattttaattcttttcatgattgttagcactatatttttggaagtattttcttagtagttgctgtcggtcttataggcatcttaacttctcagaatcgacttcagatccccaatatcatttgaagcaaggctgtgcttactccttttgaactgtgcttagcaatcaggatttcacttaatcagttcaatggcttgggttttcaaggatgctgatgtgtttgtttgcctgaatggtgcctcttcttttgctcattcctcctcacattcagtgaaatgaacacatcaaagccctcttaggacctgtgatcatcaaaaccatttggagaccccactgtctcgggagcagggcttgggaaggacaccagctcccctgtcatccctctccttgtgtttctggcttcttttcatctcccttgcaccactgaaactgatgagtttgtagccctgttcctgacacaagactccaaatctgtgtcagtgggtctcacccacttggaggcaggtcttttttttttgagatggattcttactctgggcaacagagcaagaatcctgggttcaagcgattctcctgcctcagcctcctgagtagctgggattacaggcacccgccaccacatccagctaatttttgtgtttttagtagagacggagtttctccatgttggccaggctggtctcgaactcctgacctcaaccgatctgcctaccttggcctcccaaagtgctaggattacaggcatgatcctctgtgcctggccgaggcttggcatttttaatttgaattggtagagagtgggtgccatcatcgttttgatgatcattcaaccccaggaatatgcatccctttcctgagaggcactctcatcctctacgcagagcagccagtgagctgctggagggaccttgggtcccagcacagtatcccaggctggctccctttaaatactcgttgtttttataaaagggatatgtaagtatggttggcgtgtgaactacaaatgtccctgcatcctgcgaccctgaaatggcctgtcttggtgttggcgctcctggtcgccgcggtgtcacgcgtagatctttgcttctcagtggctctgcagtcctttattttggtacagatatgtgtaatttacttacccattctcctactaatgagcacttacttttctctctctctttctttctttttagacagtgtctcgctctgtcgcccaggctggcctgcagtggtgtgatctcagctcaccgcagcctcctcctcccagttcaagtgattctcctgcctcagactcctgagtagctgggattacaggcatgtgccacgacgcctggctaatttttgtatttttggtagagatggggtttctccatgttggccaggctggtctcaaactcctgacctcaggtgatcagcctacctcagcctcccaaagcgttgggattataggcgtgagctactgcaccgaactacttttttctcttttaaacaatgctgctggccacatccttgctgccagcccttctaggtggggttgctcagagtgtgtgtgcctgttttatttttatgtttttgagagggggacctgctctgtcatccaggctggagtgcagtggcatgatcacagctccttgcagcctcagccccctgggctcaagcgatctcttgcctcagcctcccaagttgctggggccacatgtgtgcactaccacatctggctaatttttttttttttttagtagtgacgcggtctcgccatgttgtccaggctggagtttattttgaagcgtgttgctcagctgtcccctgaggtggtctgaatttgtgcccctgcacagtcattgtgggacagtcattgtgttggggacagctctggtctctgcccctccttataacctgtctcctcgtgctggttcttgtttgagttgccagttcatagcctttgcctgcttgttgatttggtatgttttttttcttgacttaaaaacaaaaaaacaaacccaaagcttctcaaattcggcactcttgctatcttgagctgggtccttctctggggtggggctgtcctgggccctgcagggtgctgagcagcagccctggcctccacccactgcatgccaggagcaccccctagtcgtgacaaccacagacagccccagacctcccagtgttccctgtgggcacagctgcatggttgggcagtgtgggtctgggtgagtgggttctttgcatccctggcctccaccccctccacgccagcaccaccctcagtcgtgacagccataaatgtccctagacatcggaaggcatcctctgggggcacgatcagccttggtggagaacccctgttttggaataaccctttctgtacccgggctattaccaccctattgtgttaccttttttctcagttcctcacttatctttagttttatttttggtgcgttgttacataggatgttttcaagttgcctgatgtgtccttccctttagggcttccgagtttgtgtcccacttagagaggtttcccccgccctaggagtccaggagcgtcggcccctggcttccactgtgtccttctgtggttcatgaggacctgccatctgggggcggcgaggtgggctgggctttgtgtttccaacatgtccaccccagccggctgggcctgcgtacccagtgggtggcgctcaggtctgcagctgcctccttggctccccggttgttagctgtgtgatctagggtaggccacttcctgcctgtgcctcagtttcctctcctgggaaatgggctggaatagctgtccctgcctcctccggttggtgggctggtcagccatgccaggcactcagagtcatccctgcctcctcgagttggtgggctggtcagccatgccaggcactcagagtcatgcctgcatgggggctccaggacctcgtcatcagcctcttcatccttactgtctggtctgttccaaaggccgcaggccccagaaagacggtgacactccaggaggttgctagacctggcgggccccagggccaggagtgaggggcggacgtgccactctgcactgctgtccctctccacccaggccttggggctcccagacaaccatgaaattacaaggcaggtttgtagatgcatagattatttagttaatgattatggttttaaatggttaattatggaacatcagatacctataaataagtgtgaaacatggactggtcctcttgtgtctgccaggggttgcctcctgactgggtgggagcctgcttgggggcccaagtctgctggcatccccgctctgtgtggctccatcccctcgcctgggggcagtggacggacaggtggcctttgcccgtagtgctccccagaccctgttgagtgcctggcaaagatgtaggtgggctgcacctccctttgtgtggaaggttccagaaggaagtgccaggtgaccaagcctgtgtctgtcctgggttttcttggctcttcacccaaacacttcccttttttgttgtttttgttttaataaaatttttttggacataatttcagactgaccccaaaattgcaagaataataggaagaattcccagacacctttcacccaggacccccatgtggcgacattccctgctttgcctttaatcctttcctctcattctctttccctgcacttcttcctaaactgtcagtgtgtggcagacatgacatccctttacctctccttcagtgtgtatttcccccagacaaggaatttttgtatcaagttatcaaaatcagaaattcacgctgataaaatcaaatctacagaccctattctgactttgcagtaatgtccttaagagtcagaagagaatccaggatcaacacagcactcagtcgtcttgcctgtcggttccttttaacctggggctgctcctgagtctgtctctgggttctctgactctgatgttttgggggcgtacaggccgtcattctgttaaatgtcccccaggtgggtttgtctgatggttcctcaggaccagattcaggccacacacttttggcaggaaagtcctggagccgacattgggtccttcttagtgcgccctatcaggaggcccatcatgctaatttgtcccatttctggtgatgttaaccttgatcctttggttaaggtgggcccgccaggtttccccaccctaacattactattgtaccatttgcatctcatggggaggccagtgtaaacacgccgttactcctcaaacgttcactgcttgtttcagcagacattgattcttgccgcatggtggttgtctagtcctgtcatttcttctgcgtttattagttgatgtctcctatacaggacagctgtcccttgttcctttcttatttctatcagggtgggcttgtggattcttactttgttcaatgggttataatccactgccatcacgattgatctggttgctcagatggctccacatttttccagaaagagcccggtcgagctggctcctgggccatttgacatgtccccaccctgctcggagcacttcccaactttttggcactgggatgctcccagctcatcctgtagtctccctcatggtcgatccctgggattgaccaatctccaaggagccctggttctgtttgtggagaatgccacttagaaaccgagatccaggtgctccgtgtgctcagtgctactggggtgtctttgcttctaggtcctctaatcagacagagctgggaagtagatgtgtgtacatcttacacacatgtacattgtgtgtgtatatatgaatagacatgtatacatacagacacctgacatttgtatccatctctgcatccatctatccacccacccatccacccatttactcacctatccatctatccacctgtccacccacccacccacctgtccatctatccatctatccatccatccatccacccacccacccatctacccatttactcacctatccatctatccacccgtccacccacccaccgacccacccacctatccatctatccatccatccatccacccacgcatccacccatttactcacctatccatctatccacctgtccacacaccgacccacccacccacctatccatccatccacccatttactcacctatccatctatccccctgtccacccacccacccaccaacctatccatctatccatccatccatccacccaccaatcccatttactcacctatccatctatccacctgtccacccacccacccacctaccaacctatccatctatccatccatccagccacccacctatccacccatttactcacctatccatctatccacctgtccacccacccacccacccacctatctaccatccatccacccacccacccatccacccacctatccatccacccacccatccatccacccattcacatatccgtccatccatctattcattcaccgatccatctgtccgtctgtccatccatccatccacccacccattcacctatccatccatccaaccgtccatctgttcattcacctatccatccatctgtctgtccatccatccatccatccgtacatccatttattcatccatccatccatccatccatccccattaatgcccatgagttcacactgaaacctctagttccagccccacacccagggtcccttaccatctttccccatcgttatttgtaactcccttggctgacagtgagaatccacccactgcctaccataaaagcatcctccagagtaggagccaatatttcttttttgtttgtctcaaagacatacagtcccaaactgtatttaaaagtttacatggattagttcttccatttttttcccccttctttactgtggttatattgtttgcttgaaataaggtttggtttacttgtttttgtttgtgttttggacaaggattttcctcctcaactcttgctgattttagttgcctgttgattgatttcttgattcaacatacgtgatgtagtgtatagaacattagcatggttccagagtcaggactgcacaaaaaggcatgggcggagaagtgtcatcaaccccctttctcctccccattcctgcccaccccctgcaggaaaggaatctcgttagtctctggctcagcctttcagggcagctcaaagaagcagatgtgtatttttttaatgtccccttcttttttttttttgagacagagtctttctctgttgcccaggctggagtgcagtggtgtaatcacagctcgttgcagccttcacctcctgggttcaagtgatcctgccacttcggcctcctgacttagctgagaccacaggtgtgtgccaccatgccaagctaatttttttatgtttttatagagaaatacagggtcttgctatgttgcccaggctggtctcaaactcccgggctcaagtgggctcccaaagtgctggaattacaggtgtgagccacggcgcctggccttataccttttctttcgcacgtgaaagtggcgctgtgctctgttcatttagctgtgtgtcctggaaaccacttcattggccagggagctcttcctggctcccctgcacagctgcgtagtgttccttgcagggatgcagcgaagtccacccagtgtctctcctgcatgtagatatttagtttgtttccaggctcttacggtggcgaactgtgctgccgtgagtaacctggtgtatatggattttcacattggtggaagggtatcttcatggtagattttcgtgagtgggattgctgggtcagaagtgcagacatattttgttagcttttatgctaaacacccatgtaagtcctgttccgccagctgtgtcgtctgggagggcctggttcccctgcctcgccagcagggtgtgctgtttcatgtctaaatacttgccaatcccagtgctgagaaatgggggctcagtggagttctaatgattgttcctgtagttatgagtggtgatgaacatcttgttgtgattaaagctgtttttgtatcttttctgtgagctgtatcttcatacttttcacttgcttttttctattggatatttgactctttcctcctaacttgaaactccaatatgtgaacctctgtggtatgtattgcaaatatttcctttgtgttttttttttctttttttttctttttgagactgaatcttgttctgttgcccaggctggagtgcagtggcacaatctcagctcattgcaacctccgcctcccaggttcaagcaattctcctgcctcagcctcctgagtagctgggattacaggcgtgtgccaccatgtccagctaatttttatatttttagtagagatagggtttcgccatgttggtcaggctggtctcaaaatcctgacctcaggtgattcaccggccttggcctcccaaaatgccgggattataggcttgagtcacctcacccagtgcaaatattttccctcggtctctggattgccttttggctttgttattggtgtttggttttcttttgccctgcagagtgtttttttttctttctcctttcctttcctttctctctcctttctctctcctttctctctactttctctcccctttctctctcctttcctttcctttcctttccttctttctttcctttcttctttctttcttttcactttctttttctttattctctttctttcaagacgaggtcttactatgttgcccacgctggtctcaaactcctgggctcaagcagtcttcctgccttggcctcccaagcagctgaaattacaggtgtgagcctgtaattagccacacctggctaattaaaaaaaatagttagctgggcacggtggcttacacctgtagtccccggactgtgggaggatcacttgagcccaggagtttgagaccagcctgggcaacatggtgagacccccatctctacaaaaaagaaaaaaaagttagccaggcatagtggtgtatgcctgtggtcccacctactcaggaggctgaggtgggaggattgcttgagcccaggagttcaaggctgccatgagctatgatcacaccactgtactccagcctgagtgacagagcgagaccctgtctcaacaaaagtcacatttctgagtctttactttctttgcctcttgattagagctgtggttgtaaagccctttccgtctctggggctggagaggagttcacctcgtttttttctggctctcgtatgattcctcctttacactcacgttccgattccaccgccgttcattctcgcagaggtgcgaggtggggacctcactttattgttttctgaatggctaccctgttgtcccagctccattgattaaaaaaatccctgcttgggccgggcatggtggctcacgcctgtgatcatagcactttgggcccaggcgggcggatcacctgaggtcaggagttcgagaccagcctgactaacatggagaaaccccatctctaataaaaattagctgggtgtggtggcgcatgcctgtaatcccagcttctcgggaggctgaggaaggaggattgcttgaacccaggaggcggaggttgtggtgagccaagatcgtgccattgcactccagcctgggcaacaagagcaagactctgtctcaaaataaacaaacaaacaaacaaacaaataaataaatccctgcttggccaggtgcagtggctcacacctgtaatcctagcactttgggagggtg[134 bp omitted]gagttaggagaatcgcttgaacccgggaggtggaggttgtagtgagctgagattgtgccactgccctccagcctgggtgacgagagtgagaccccgtctaaaaaaaaggtccctgcttaccccactgccttggggaaccccctctgtcccccacacagtctccgtatatgcctgagtctgtgtttggtcttcctcgtctctccacagcaggtctgccccgtgggttgttggccgcggtcggatgctcagccgcttgagaatgctgtctcctgcctgggtgcgtctggctcccctctgcgcgtcctgtttcgtgttattttttagagtttgtgcatttctctgtgtactttggtacacaaatgcttctttgaagttaatacgtggcagtaaagctggcactggggacggctagggcggtggatggcgtgtgtcctggagggcgggtgtgctggcagagacttaaggatgaggttaaggattctcctaagtccttttcttctgggggaaggagactcgtgggaacccctccagtgcaatggcctcgccatttccacacgccggcccctggcactttccaccattcgtgtgctcggctcccagctcttgccctgccacaggccctcgctccctcctcacccggcctggagtgcatggcccacagtgggcctgttctcaccgcgcatcccgccagctccttggcccttctcagcccttgctgccccccgggctcatacacctctacccacgatccagagacggatcgtcaggcccaccccagcccggcagcttcctagagcaatgccctcagccaggcatgttgtctggggacgctcggcagtgtctagacacagccagtccctgtgacccggtgtgcatgtgtgctgccgtgcacgtttcagctccccagtttcatgtagttgagaacgcttgactgtgagatgcaccacggctctgtgctccctgggagtccccgtacccccgtgcggtgagcgtgagaagtcacccacagaggggcaggaaggcggttatattttaatggtcacaggtgggcagtacccctgggtgttgggcagaggccacccctgctcccctccggaatacactccctactgtccaggcagccctcagattacagcccccagcctgaccccagagacatgcaaatatgggacagacgtaaggctttggtgccggaaccaggagcatcccgggcaaagtgagacgagctggtcaccccctgcacagtctcccacttccccaggcttcattctcccacccctggaagtggtaacccttctagaggtacctgtgtagcgtcttccttttctgcgcgctctgtgtgtgccggcctgtcctgcggccgtcacctggcagatagctgctgtcccagggatccagcacaaagcttggagatgcgtctgtgcagcccactctgtggctgtgtgtggagttgatggtggacttctgtcaccccatgacatctgaggctacaggagtggcctgtggagatgttggtggccaggtggcacaagtatggagaacacagatgcccggggcagctggcaagaaggggcaggtgcttttgaaagatgttaccaaaccgtccttcccagtggtgctgccaggccactggggcatagatcagtgtgggcacctgttcctccatggcctctgtgacctgtcgtgtcattggacttgctggtcagcctcctgagtgacaggatggtgacagctgccacttaggggacctcattgagcttcctgaagaccccacgatgagggtgttaacatggggagccccctttacagatgaggaaactgaggccccagaggtgggggcctcaccctcctccgggcctcatggtgggtggtgggggttcaccttcctttatttgcatgtggatatcaagcagttgtcccagcactgtttgttgaaacaccttttctttctgcattcagtggtcttgggaccaggccttgggggactgtgctctgtaccatgtcctcacccaggacgtccctctaagatcgctcttagaggctacagggccacgggggagaaggtccccaccattctccagcggctgcctcgccacacagctgggagggatgtggggtagagagccccctgcttggcactggccctgggggtctaagtgatatgaggggcaggggtcgcccctgcagtcaccgcgtcctcctctggcggaggtgagtggtgatgctgggtcacaagaggtggcttctcatcccagtggtctcgtgctgcacttcagggcctccatcacctgatctgggggctgtgggggtcctgggagagggctcatgggtaggggacagtttttgatgttctcttagtgaaggacagagaagaaggatggggggctggtggcggcggcagggagccaggatggtgctggtcccgcctcccttccttccatccctgctgcaggcctgccctcttcatgcctggctccccgcagcctctccctgtccccgtctgtcccgccactactggaaccccaccctgcctctgggtagtgtgcaccccatcctcagagcggaacccccatcccctgggcttgtgggggcttcacttcctgctgtttccccgcagcccacggccattctcctgctcctcccacccctcctcactgtccttcctggcactccaggcccctccgccgcatctttctgactcgtgttgccacatcatctgccctggctggggttttatctccctggcaactggaaatgtgttggttaagatatggtgagttaggccgggtgcagtggctcatggctgtaatcccagcactctgggaggccgaggcaggtggatcccctgaggtcaggagttcaagaccagcctggcaaacatggtgaaacaccatttctactaaaattacaaaaattagctgggcatggtggcgcatgcctgtcatcccagctactttggaggctgaggcgggagaattgcttgaacctgggaagcggaggctgcagtgacctgagatcatgccgttgcactccagcctgggcaacagagcgaaactccatctcaaaaaaaaaaaaaaagatatggtgagttaagagggtaaccagccctggagctgacagcctgggttagcacctctgggacttgggacggcctccatgttccgctctgtgaagtgggagtgacaacagtgcctttcccatggggctgctgggaagtgactcaacgaggagcaccagcaaggggacaccagagcgggccccagccacctcctggcagaagcatggggctcacgaggcggggcgggggtggtgaggaccaggcgcagacctgggcagggacctgggcggaacgggggaggcggaatcttctagaagggccttgggggagggccctgtccccaccatccctcgtgagcaccccctgccaacctccatctcccatttgagagttggggaacgtagcaaagttatctcaggactggaatatgaatggcagctcttggccaggctctgccatattggagaggtttctagaaggtcctggaagcccactggctcctctgtcattttcggcatggttttggcctctcctcttctcccttgcttcattgctgtgatgtcaagcatctcttcctgtgactgttgactctttttgtatcttctttggagaaatgtctgctccatcctttgcccgtgttttctgttaggttgtttgtcttttgttgagttgcaagagttgttgacatattctgcatacaagttccttatcagataatgttttgc[131 bp omitted]cagcctccaactcccaggctcaagcgatcctcccacctcagcctcccgagtagctgggactgcaggtgtgcaccacaatgcctggctaatttttttcttctttattttttgtggagatggcatcttgctgtgttgcctagtctggtcttgaactcctgtgttcaagtgatcctcccacctctgcctgccaaagtgctgggattatagacatgagctgccatgaccagccaagtcttttcactttcttgaggtctttgcaaacaacttttctttttccacatgcacttttggtgttttagccagaaatcttgcctgatccaaagccacgaaggtttaatcctatggttttcctaagagttgggtagttctgagctgggtatactagctcacatctatatgcccaatgctttggaagggtgggttgggaggatcgtttgaggccaggagtttgagaccagtgtgggcaacataggaagatactgttggtacaaaaagtttttaaaaagagttttgtagtttgggcacttacatttagatctatgacctatttggaattagtataaatatatggtgtgaggtaagggtccaccttcattttttgtgtgtgaatatccagctgtcccagcactatttgttgaaaaaactgttctttttgcattgagtggtcttggcactgttattgaaaatcacctgactttaagcgtgtgggtttatttctggactctcagctttctcccgtttatctaatgtctgtacttatgccagtaccatgctgtcttgattactgtaggttcataaccgtgaattattttttgtctagtcttgagtgtagatgttaaggaaaaataatatggttcttacattaacatatagagacccagattagctgatgagactacagccttcttagttgagatccagaaaaccctggctgttccctgcctccttgtttcttctttttctttttctttttttttttttttttgagacagagtcttactctgtcacccagactggagtgcagtgccacaatctcaattcacggtaacctctgccttctgggttcaagcgattctcctgcttcagtcccctgattagctgggactataggcatgtaccaccacacttggctaattttttttttttttttaatatttttagtagagacaggttttcaccatactggccaggctggtatcgaactcctgacctcgtgatctgcccgccttggcctcccaaagtgctaggattataggcatgagtgaccatgcctggcccctgccttttttttttttttttttttttttttaaagacagagtttcgctgtgttgcccaggctggagtgcagtggcatgatctcggctcaggcagcctctgcctcccaggttcaagtaattctcctgcctcagcttcctgagtagctgggactacaggtggatgccaccacgctcagctaatttttgtatttttagtagagatggggttttgccatgttggtgaggctggtctcaaactcctgacctcgaaagatctgctcaccttggcctcccaaagtgctgggattccaggtgtgagccaccgctcccggcctattccctgcttcctttattgagccatgccaccttcctcagttggattttggtatcaataaggatatgaaggttttggtgacatatttctaaataagaggctgtttccctaggatgcagaggttggtgacaaatgtcagcttttcagttctttcactcaagaaggatctgcaacttgaattcagcaggtttggtcttcagtggggcctggaagtggaagggatgtggtggtgtccacttggtttctgatcaccttggctctttcacggcctgactctcctcttccagtgaaaacctgctatgccttgagcttcagaggacagaggtccaggtggttgtttggtttggtctttttaactttttattttgaaataattttagactcactgaactgttgcaaagatagcacagagcgttcctgtgtacctttcactcagcccctaatgtgagcatcttatgtaaccacagaatgctcagaaattagccaattccatactaccatgcaatttactcaactatagattctttttttttttgagtcagagccttgctctgtctcccaggctggagtgcaggggcgccatcttggctcactgcagccactgcctcccaggttcaagcgattctcctgcctcagcctcctgagtagctgggattacaggtgccttccactacgcctggctaacttttgtatttttagtagacacagggtttcaccatgttggccaggctggtctcaagctcctgacctcaggtgctctgcctgccttggcctcccaaagtgctgggattacaggtgtgagccactgcacctggcctcaactatagattctattagaatatcactagttgtcccaccaatgtccctttcctggtctaggacctcgtccaggaccccactcaccatttagtctcataggctcctccaggtgtgccaaggcctccatcttgccttgactttcacgaccttggcacttccaaagagcaccaggcagatgttttgtagaaggaacttcccttggctttcagacgttttctcatggttagcctgggctctggactttttagaagcataccatagggctcatgctgctccttccctgtgcagtgtatcaggaggtgcgtgtggctgatgtggctgatgcggctcagcgtggtggtgttgaccgtggccgcctggctgaggcgtcggtcaagtttctccactgcaaagttactccttttccctttgggactttgagcctgtgaacatgtcctgttccttcaacttttgctcaccaatttttacatttccgcgtggctctttcctgcaggaaatattcccgtggtgttggactggtgattttatgttatgcttattcctttgacacttatgaaggagaattcttctgtggaggaaagctgtccctcttccccatttatcagttgcattttatttatttatatatttttgagacagagtctcactcttttgcccaggctggaatgcagtggcgcgatcttcgctcactgcaacctccgcctcccaggttcaagcaattctcctgcctcagcctcccgagtagctgggattacaggtgcccaccatcacacctggctaatttttgtatttttagtagagatggggtttc[142 bp omitted]gtgtgtttgttttatcctgtgggttgtaacatgatgctgtcattcatcctggtgctgaggtaggtggtcctcgttttggccatcaggagcccctcgcatgtcctttctgcccgctcccatcctgtcaagccttcccttcctctcaggtcctgcagggcgatctgggctcagcttgtatattctgccccagccctggaattgaccacgtgtcctgcagggctccctggttcctcacagtggagaatgatgtttacaaactgtggcctgggtgctggccgtgctcgatgctgttggggcatcattgcttctaggttttctctgctgacagggcttggaagtaggaacgctaacccatgtgtatatgcacacctgtatccatctcactgtctcttttccagagctcctgagttcatactcatagggtgccagagcgttcatgtcgtgggcccatctgaggctttgggtgtccacccccaacctgtaaggggtacgcagagcccctggaaaaaggaggaccttcctgtggggctgaagacttgggtgggaggcaggagatggcatgtcccttttgaaggccacctggggcttgtggccgtgggagaggcaggcagggctgggccctgggccatcccggctcaggcaacctcgccaggcgtgcaggtgagaggatcccttctttctggttcagagactcctgtttttggacccgtgctcagacccgggaaagaggtgggcagtgtggtctggtgcaggcccaactttcggaacccacccgagggtcagccctgggggctccggtgactggcagccccatggccaagagtacctccttttggggggttcttgggggccaagttctgtggtcctcaggcctctgtgctgtggtgccactgtctcctccctgattcccgccagtggtctcttcttccgccccacccgcgggtcttggcggaggggctcacagagccagcactgtatctgaggctgccctcagggtcagcacgtgcggggcagtggctgttacgtaatcggtagctcgtgctgtttgggggcgttgtcgtccgatgccttgggctgtcactgcaggcttctgtcatgctgcggtgggctccccttgccagttctattcctagtgcccagatctgcctagaagccgcagcagggttgacaggctgggcccgtggcagggtgcagtcaaacctaagccacctgggtcttcccctcctggcagttaatagaacttagcttttggagcagttttagatttacagagaatttgggcaagtggtagtgagagttcccgtctctgcctgccaccccccacccgttttccttgtgggaacatcctgcctgttgtggcgcatttgtctcttgattaacacgttgttaatgacacttcccgcttcattcggattgcctctgctttcccctaatggactgttttctgtcccagggccccccacaccgggattcctcgtggcccgtagccgtcccaggatccttcgtggcccgtggcagtcctgggatccctcgtggcccatggccctctcctcaggctcctctgggctgggaccactcccgacacgttccctgtgttttgtgcctggacagtgttgagggggctggccaggcagatggtagggcgcccctcgattggggtgtgtctggcattttgctcaggctggcacgcggtggaggctgttgggaggacttcagaggtaagggctcttctcatcacatcccggtgagcgtcaggacgtgggccatcagcaggatggggttggagccgtgtggctgttgctgctgccctgacggcgtagctgcaggggttcatcatcctctccccgggatgctgcccccgactttccatttgtgcactgatggaaggaagtcaccgcatagcccatgcgtaaggaatagggagctgcctgggccccaacccctcgtcttccctcctggaggggcagtggaggcaggctagcccggcctctcatctattgcggatggggaccagggtggacagaggcctaggctcgggctgtgccttgagaactggggcccggcctcagccccagagcctccagcctcccagcttggagtgggcgcttttggggccccagagagggagggcagaaggacccgtggtcttggtagcaccgggctgaggtctgtccagctgagagcctcagggtctggtggcttccatgccttcttgaccaagtgctgagagtgggggtggcccgtcgtgcagcgggggagagagctgtacaaagagacagttacttgtggcaggggagacccaggatcccgtggggacctggtggcagccaggagcagcaggtcacaggggagaggcctgggtggcccctgggagtggacaggcccttgtctccgctgaagtcagggaggtaccctttgctgctatgacaaatggccgcagacacagtggctgaaaacagcacccgttcattctctcccatgcctggaggagagaagtctgacatgggcctccctgggctaaaatcatgatgtgggcagggctgttccttctggaggctcccggagacagtccattcctttcctctcccagcgtctagaggtgtccgcatccctcggcttggggcccttcctcccccttcacagccacagcgcagcgttttccaggccttgactctcaccctctggcctcctcccatgaggaggctgtgaggacattccgcctcccggatcatcccctatctcaagatgcctaactcagtcccatccgcaaagcccctgttgccatggaaggtgaaatagtcccagggtctgggggttaggatggggacatctttgggaaccattgttctgctgcccacagctgcgtggagggattccggtcctcgggttcagttggtgacagtgtcgggtaggcctgggcaggtgggagaggtcgtgaagccctttgcagggcacttggccgctcatctggcacaggggaagaggcgcagcccgtggcccggcagtccaggacctgctgttcccttcctacccggggcggggcctgtgggaagatatggaagtcgggtgaatgagccgtgcccagtgattttaaaaagcagattaaaataacatagaaaatgtcagagctcattgcgtgctctagggcatttgtgaaacttgcattatttatttttttgagacagggtctcgctctgtcgcccaggctgcagccttgaactcctgggctcatgcgatcctcctgaggagctgggaccacaggcacatgctaccacacccggctaagtgttttgttttgttttgtttttgagacggagtctggctctgttgcccaggctggggtgcagtggcacgatctcggctcgctgcaagctccacctcctgggttcacgccattctcctgcctc[223 bp omitted]gccaggctgttgagactcctggcctcaagtgatcctccctcatcatcctcccaaagtgctggcattacaggtgtgagccactgtactacttggtgttatttaaaagtcctggtgaattgtaaaaagtgtacaacttcgggaggc[135 bp omitted]gaggcaggagaattgcttgaacccggcaggcggaggttgcagtgagccgagatcgtgccactgcactccagcctgggtgacagagcgagagtccgtctcaaaaaaaaaaaaaaaagtacaacaaaaccagggccccagggggcgagctcctctgccctggaggttgggcctgccgaggggaccttagagtgcttctgaagtgagagttggcattagctgagcagaaggaagcagagggcagcctgagctgagagccagcaccggtggagctctgagacgagggctcgcaggcctgggcacccaccgagccccaggtgtgccaagtccagtgggagctgcaggtcaggttgtgaaagtccttttttttccctagacgtagtcttgctctgtcacccaggttggagtgcgtgcaatggcatgatctcggctcactgtaacctctacctcccaggttcaagtgattctcaagcctcagcctcctgagtagctgggattacaggtgcacatcaccacgcccggctaatttttgtgtttgtagtagagacggggtttcaccatgttgaccaggctggtcttgaacccctgacctcagctgatctgcctgcctcggcctcccaaagtgctgggattccagatgtcagccacctcgccccgccatgaaagtcttgatattggccggcgtggtggcttatgcctgtaatcccagtactttgggaacccaaggcaggaggatcacttgaggccaggagctcgagaccagcctggacgctatagtgagaccctgtctcttaaaaaaaataaaaataaaaaagtcttggtgtcacatccaaagtttggagttctgttccgcatccatcctacaagtatctgagcgtctttgtgtccaggactaagttcaacgcctgggctgtgccttggcccctgtgcggtcgcagcccctgcccccctctctccccgtgctctgcctcttggtgttgggaggtgggggaaaaactgggtgcattttctgcacttttccccttggaggaagcaaaacttcttgaaaatctctcagtaggtgtctgcgtcttaaggcctccagaagcttctttggtttcatttgactgttcacggatactcccgctgccttggcccgtagattttaggagctaagcttaaaatgggccctcattggaaaacttgactgggtaaagtgcttatagttacggatttttgtcttgttaaaaattgacaagaatgtggaaaatctgaataaaggcaagcgtcctcgggctgcgtacagctggtgggagtcgaatttagaattaaaacttgagcgtgccatcagtttagttaatcatgcttttatttgcatgttttaggaaccatcactgttgctggaggcacctgacaaatcctagcgaatttttggagcatctccacccaggaacctcgccatccagaagtaagtaacacgggcctggcccccaggtggccccacaggaccagggaccggaaggctgtggcctcttccctgggtggcccgccagggagaaggtggtggcctgaccggctctgaattcccgggacgtccaggcgcaagctgtgcttagacgggagcctgcgggccatggtagggaggttcttctgcaagtttcttcatgaagcctgtctgctttgggcttgcatctcgcccttcggcatcgaaccacccgactctcacttctagaaactggaaaagctgtggctcctcctgcatttcgggtgacactggggtttcccaggacccactaccctgtctgcatcggccctggggacacctgagctcaaggggcgttcccccacacactgtcagaagtggggagcagttagagcagggctctctaaaaatgggagactcatttttaaatgcctttgaggtagttccatggcccagccgccccgggtttagttccttttcttgtgcctttcttataagccggtggcacaaagaggtgcctctggtggcagcccagggggaccactcaggagaagagagagaatgacctcatcccttctggccacacccacagggcccgggtgacccagtggagggtgtcaagtgtgggatgagcagtgcagtgtcctcccgtcaaggcagaggtggcagtggcagcggcggccggcagagcaccggggaaaggctgccttgtgcggcgtcgcccttggattgtgtgccgcttccctgtgcagagggaggaaggggcccatccagggccccctgtagctaatgagggcgagtgtggacttgagctggggcccttgagtcatttgtgggtgccttttctgttctactacgattaggaccttgaggagggtggtggagcccagcctcttttgggaagtcataaagtgtaagggaagaggctctggtcacgtggttggcaaactatggcccctggacccaatctgaccccctgtttttataaataaagttttattggcacatggctgtgtccatttgcctgagcattgtccctggttgccttctcctcacagtgggagaagtgactagctggaacagagggcgtggcctgcgcatctggagatatttcctgtttgggcctgtgcagaaaaccatgcgcctcctcttgtccaggttaacttactgctggctggagcaggatggacgagtctcttggtgacttggtttggaaattggcaggtctgtctgtgcctcctgaaatcttgcttttacccttcaagtttgtgcttccttacaagatggtcaattttctaaaactcagctgttttctttgtacccaaattaacacagcatgaaccaagtaagcaacttgctctgtcagttagctttattatttatttatttatttttattttttttgagacagagtctccctctgtcacccaggctggagtgcagtggcgtgatctcagctcactgcaagctccgcctcccgggttcacgccattctcctgcctcagcctccctagtagctgggactacacgagcctgccaccacgcccggctaattttttgtattttcagtagagatggggtttcac[137 bp omitted]acccaggctggagtgcagtggtgtgatcatagctcactgcagcctccacctcctgggctcaagggatcctcccgcctcagcctcctgagtagccgggactacaggcatgcacaccacacctggctaatttttttattttttgtagaggctatgttgcccaggctggtctcaaattcctggcctcaaatgatcctcccacctcaacctcccaatgtgctggggtcacaggcgtgagtcacctcatcctgccgaagttcaccacatagcccttgataaacccactttatatctgaaggtgctgagtgcagcaaccaggaggtgctagaaagtcctcggggagagcacaggagacaggagtaagggagcagggctcctgcttccgaaggcctggagctgaaggagaggaggagctcagggcaaaccatgtgggcttgctgtggtttggcaggtccccagataggctgccttcactttgtaaaagttaacttttactgagaggaaattcacatacatcatattcactctttaaaggatacagtttggaggtcgttggtgcactcacagggctgggcagcatcaccactcattccggagcatctcattgtcccagaggaagctctgtccccctcagcagttgctcttcatcctgtcccccacaccccaaaaccaggcatctccttcctgcctctgtggactggcctgtcctggacatctcatagaaatgggatcgcgcactgtgtggccttttgtgcctggagtctctcactgagtggcccatcctcagagttcatccactccgtggcctgcgtcagagccttgctccatttcatggctgagtcgcgttctgctgtgtgtggtgccgggcgacctgctcccctgctgatgggcgctcatgtggcctcctctctggctattgggagtcgtgctgctgtggacattggtgtgcaggtgttggtgtggacgttggtgtgcaggtgttggtgtggacgttggtgtgcaggtgctggtgtggacgttggtgtgcaggtgttggtgtgggtgttggtgtggatgttggtgtgcaggtgttggtgtgggtgttggtgtgcaggtgctggtgtgggtgttggtgtgggtgttggtgtgcaggtgctggtgtggatgttggtgtgggtgttggtgtgcacgtattggtgtgcaggtgttggtgtggatgttggtgtggacattggtgtgcaggtgttggtgtgggtgttggtgtggacgttggcgtgcaggtgttggtgtgggtgttggtgtgcaggtgttggtgtggacattggtgtgcaggtgctggtgtggatgttggtgtgcaggtgctggtgtggacgttggtgtgcgggtgttggtgtgcgtgttggtgtgcaggtgtgggtgttggtgttggtgtgcaggtgttggtgtggatgttggtgtgggtgttggtgtgcacgtattggtgtgcaggtgttggtgtgcaggtattggtgtggatgttggtgtgcaggtgttggtgtgcgggtgttggtgtgggtgttcgtgtgggggtgttggtgtacaggtgtttgtgtggacgttggtgtgcaggtgttggcgtggatgttggtgtgcaggtgttggtgtgggtgttggtgtgcaggtggtgtgcaggtgtgggtgttggtgtgggtgttggtgtgcaggtattggtgtggacagtggtgtgcaggtgctggtgtggacgttggtgtgcaggtgctgctgtggacggtgtgcagatgttggtgtggacgttggtgtgcaggtgtcggtgtgggtgtgcaggtgttggtgtgcaggtgttagtgtgcaggtgttggtgtggatgttggtgtgggtgttggtgtgcaggtgttagtgtgcaggtgttagtgtgcaggtgttggtgtggatgttggtgtgcaggtgctgctgtggacggtgtgcaggtgttggtgtggacgttggtgtgcaggtgtcggtgtgggtgttggtgtgcaggtgttggtgtggatgttggtgtgcaggtgttagtgtgcaggtgttagtgtgcaggtgttggtgtggatgttggtgtgcaggtgttggtgtggatgttggtgtgggtgttggtgtgcaggtgttggtgtggatattggtgtgcaggtgttagtgtgcaggtgttgttgatgttggtgtgggtgttggtgtacaggtgttggtatgcagatggtgtagatgttggtgtgcaggtgttggtgtgggtgttggtgtgcaggtgttggtgtgtaggtgttggtgtgcaggtgctgctgtggacatgcgtttttgtttcccttgggccgacacatgggtgtggaatcgcgggtccaagggtacattctgtttagccttctcaggaatcgcctgcccgtctccacggcggctgcacccttcaacattcccaccagccgtgcatgagggctgcctctggtcttggaaaagactctcggaatagttgctcactttctccatttcgaccctggagccgtcgcttggtgcccagaggaagccaggccgcgggcgctgggggaagggggtcccactgcagctgcaagtcggcctctcctcctgcctgcttcccgtgcctcggctgttggcttatttgagtattgaatcgtaatggtttcttcctcctaaatagaatgctaggtttccttgttcaggcctcgtaacttttcctgacctgtaaaaaagcacaccttgaacacttcgctttctgtctgtgcacacggataggtgtcagctgggggctgatagaaaacatccctgactggccgggtgtggtggctcacgcctgtcataccagcactttgggaggctgaggcaggcggatcacctgaggtcaggagttcaagaccagcctggttaacatggtgaaactccgtctcaactaaaaatacaaaaattagccggacgtggtggcgtgtgcctacaatcccagctactcgggggctgaggcaggagaattgcttgaacctgggggcagaggttgcagtgagctgagatcgcaccactgcactccacctgggcgacagagtgaaactgtctcaaaaaaaaaaaaaaaagaaagaaaacacccctggctgcaggcttcgggcggccctgtgtcctccagctcttggggtggggccactctgacatcatgtgctgttttggggagtgtcatgaccaggagggcatcttttgttttttcttttaattaaaacaaatactaggctgggcatggcagctcatgcctgtaaccccagcactttgggaggccaaggcgggtggccttgattgcttgaggccagaagttcaagaccagcctgggcagcatggtgagacctggtctctacaaaacaaatacagaaagtactgggtgtggtggcatgtacctgtggggcgggaggatggcttgagcccgggagttccaggctgcagtgagctgtgattgtgccaccgcactccagcctgggcgatacagcaagaccctgtttcaaaaaataaaataaaaaacaaacactgaaggaaaagagtagatagagtgcaggcctggcacaggttttttttttttttttttttgagacagtctcgctctgttgccagactggagtgcagtggcgtgatcttggctcactggaacctctgccccaggttcaagcaattttcctgcctcagcctcccgagtagctgggattacaggagcgtgccaccatgcccggctaatttttgtatttttttagtagagacagggtttcacggtgttggccaggatggtcttgatctgttgacctcgtgatctgcctgcctcgtcctcccaaagtgttgggattacaggcgtgagccaccatatccagccagatttttaatttaagagacttggcacgcattttttgtttgcctctgtctgctttccgtaggcccccaagcaggggcaatgtgtgatcgtccgtttgttttctcctctgcagtttgggggtccttgggtagaaggactgagcattgagcttggatcaaactgttggttttatggacagagtcaagtggcccggaggtggtgacttgggccatgttccttgtgagggttttgtctgtggctcattcattcagcacaggcgggccctgtggccaggtgctgatagtcctatgttccctctgagagtgtggccctggtccctcatctcctggggatcagtggtagggccaggcctggccccaggtgctctgggtcttgtgcctgtccttcctcacaccacctctcttgggtacgtagggcacagggcacaggacctccgcccgagggccaccgtgctgaggtgtggctcacatctcgtggcttcatcttgaggctggtccgtctgcttgtctcaccacacttaggcctgagtgtctgaagaagtaatgagctgcaaacctcatgacctggaaatcccacctgtcagagcccaggcctcaggaggaggcaactgaggacattgggagtgccagcaactggagcccacttccacctgcctcacttaggccactggccacccccacggatggtcccgggagttagctctgtgaccatgcgcggctgttcctgctccacctcttggagtgccgcctctgtctgttggtgttgcaggggagctgggttgggagagctcactcccttgtctgattttctggaaactgtgctcctgtctgagtgagcgcaggcagaggtgctcagtttacccgaggtgtgccgggcaggagtgctctccaggtgggggggcttggagggatgtgggggttggtactttttttttttgaagttttaatttgtagtttttatgggtacaaggtatgcttatttctttgcatggtacatttcccacatggcagtcgtggtggactgaatgatggtccccatggatgtccacatcttaatccctggaacccatgaatatattaccttaaatgacaaaagggacttttcgcgggtgggactgagtgaaggaccctgagctgggagatgaccctggatgatctggggagcccgatgtcctcaccgggtcctcatgagaggaggcaggagggtgagagtcagagagaggctggaagaggctgtgctgtggctgcggaggtggaggaagggccttgagctgagggaacctggcacgcgctggtgctctctggagtaggacgaagcagagaacgttctcgtgccaaggttttctctttcctgcctgagggccctttatgtagatcagaccagagacaagtgaatcccggtcttgccaggggaggcatttggagctgctcgtgggacgtggtgatgcggtgccaggccacatgcccggggctggggccgagtggcgttctcgtgctgcctctgtggccaggtttcacttgggaacctggctgcatcgcgggttcctcctgggccttctggtggcttggggctcctctgtcctcggtccctgctgggaaccgtgctttggcagcaggaaccagcgagatggcagcacaggggctggaggccggctgggactcactggggccgcatggggcttcacctgatgcccagccctcctgggacagggaccagtgggagcaggaggtgggacaagaggacgagggctcgagggagcccccacacttcctacc[132 bp omitted]gcagcctcgatctcctgtgctcaaggaatcctcctgcctcagcctctaagtagctgggtgtgcaccaccacgcctggctgatttttaaattttttgtagagatggggtctcgctatgttcaggctcatcctgaacatctagccccaagtgatcacccaccttggcctcccacagtgctggggtcacaggcgtgagcccctgcccctggccttcttatttttaaaccgattctttgtcatcagtttctgcgtgtggccgctgagagccatcacctggctgtttcttgggtgtcccttgcgcccacacccctgcatcctgccccaccttcaagttcttccatcccagagtggactctggggtcaaggagagtcctcagatcttggggacatgggcagttgtggggcctggggtcatgtggacaggatgccggcccagccccagcagtgccagtgcaggtggggtgaaggcctgatggggtcagccagactgtccccacctgaagccccctgccaagcccctgcatctgaagactgaagagtgagggtggcagcccgggagggtatccttgggcccagtgtgtcagcgatcaggagagcagcccaggctggagcgtgcggccctgctcagccgggccggaagcgtccctcacttgttcctcccccaggttgcagaggagctgtccaggacagccggggtggggccgcccataagatgcagctgctggtcccatgtcatggtcacagcaggagggctgaggagccaggcctggcccgtggtgtgcagggtccctggaacaaacagctgccctaaaaaaaaaaaaggctttaaggccaggtgcagtggctcatgcctgtaattccagcactttgggaggccgaggtgggtggatcatgaggtcaggagttggagaccagcctgaccaacatggtgaaacctcgtcctactaaaaatacaaaaattagctggacatggtggggagtgcctgtaatcccagctactcagaaggctcaagcaggagaattgcttgaacccgggaaacggaggtttcagtgagctgagatcgcgccactgcacttcagcctgactgacaagagcgagactccgtctcaaaaaacaaaaacaaaaaggctttattgagatacaatttgcgaaccatacaagtcacccatttgaagcatgtcattcagtggtgtgtagtttactcagaaggctgctcttgggcctcaaaatgagtagaggggagaaagggaccctttttttgttgttagagattttgagagctgggttgggttaagcggctttcatggtaagctggaggcccaagcctgtcttgagccccgaataaagaagaaacctaggggtggggcgtggtggctcacgcctataatcccagcactttgggaggccgagatgaggggatcgctaagcccaggagtttgccctggtctcccagcttcctctgcggtgccccagccaggagcagctgtagactctgtggaccgtatgtgaaatgaacccacagggttcccgtgctaaaaccatggagagtcttcaggtggggccagccgggccttaaactgtgtatctaactgagtggggcctggggtacccatgggggttgcatgccctggaagccagccctgcctgccatccacttcccacagccagagagagctttctagaaatttcggttggatcgtgtctccttgctctgaaccacctgtcggcttcccgtccaaccccacaggagggcaggctccttccagcccagcccccagggcccaccctggtctagcctcgatcctgccgcctcctctgcgctccctgccatccggcctctggggccttagctcttccctggcttcgctgggtccttccctttgcctagactttcctcctgccctggaccgcccagaacttgcacccctgcgtgtttgacaatcacttccagacgcagccccgctgccacccagacctctctggtcccaaaccaacttcatttgtctttttccttttttttaaatttatttatttattttattttacttattaattttttttgagacagagtttcactcgttgcccaggctggagtgcaatggcactatctcggctcaatgcaacctctgcctcctgggttcaggcagttgtcctgcctcagtctcccaagtagctgggattacaggcgcatgccaccacacccagctaatgtttgtatttttagtagagatgggagtttcaccatgttggccatgtcttgagccccgaataaagaagaaacccagggacagggcgtggtggctcacacctataatcccagcactttgggaggccgaggtgaggatcgctaagcccaggagtttgccctggtctcccagcttcctc[139 bp omitted]tggagtgtagtgatgtgatcacagctcactgcggcctcaaactcctgagctcaatcgagtgtcccacttcagcctcccagagcactgggaccacaggtgtgtgctgcagtgtctggccttcatttgtcttcgaaactcttgctcgcccctctgtgacgttgttaattagtagtcttccagattgggccccgtctcgtcccagaaccgaaactctgcctggcacgtggtggggcctgcacatttgctcagcggaggaggattctggggccctgggttcccgaggctggcaagttggctcagagctgcccttgggatgggtcagggtggggtaggctgggggcagcacagagtgggcacaaggcagttttgtggttttgaaattgagtttgtatcaagagctttactgcttttgtaaaaacttactggcatggtaccaagagaaattcaaacaatagttggtaataaaatccctccctacccctgccctggtgtccccataggagctgactgccgccccctttctgcagcattagctattgtctagaatcttctacaaggatggggcagggcggtgggagcagggcccgagggtcccagttgttgggaactatgttggcctggctccagccagctcacaccacggggcagccgaggcctcctttggcccagctgaggccttcacggcaccccgaggcccagagtcccgtgagcgggagacagagaaaggggtctccaaggaagggtgggcctggcagcagcactatgagcagcggcaggtgcagggtgccaccaggcagaggccggcagaggcagaagccggtacggttgccctgcgtctgtttccacatctgtgtatttgtgccagggctgctaaacatgcacagcaggcactgtggcgcccaccccaaatcacaggaaggatgtgtctctctgtgaccgtgaagcccaccaccactccatagtgttggctcacacccggctgtttcccacgcctccccgcgtgtccccaagacaaaaggtctgggatgaagctgccgtttgcatggctggggatgtctccttgtcctctctcagctgagaagagtgccagtttcctctcttcttttgcgagttcaggagagcattattctttcttctttccatcattcttcctccctccctttcttctctctcttttcagtttttttttttttttttgagacggagtttctcgtcacccaggctggagtgcaatggcgcaatcttggctcactgcaacctctgcctcccgggttcaagcaattctcttgcctcagcctcctgagtagctggggttacaggcacccaccaccacacccggctaattttcatatttttgagtagagatggggttcatggtgctggcc[136 bp omitted]acactcatttgttcacccatttaaagtgtccagttccacagttttcagtatattcaaaaacttgtgcaactatcatcacaatttgatttttattcatttactttttagagacagggtcttgctctgttgcccagaggctggagtgcaggggtgcagtcatagctcactgcagcctcgaaatcctggcctcaagtgatactcctgcctcagctttttgagtagttggcaggcacgcaccaccatgcctggctaattttttattttaatttttagtagagatggggtctccctacgttgcctaggctggtctcgaactcctgggctagagcacccctcccgcctcagccccccagagttctgggattacaggtgcgagccactgcactggccacagtcagtggagaacattggcatcccctacagagaagccctgtagcctggggtgtaacacacggccttttgtgtctggcttctctcactgtgatgtcctcaaggttcctccatgtggcgcctgtgtcagagcctcgttgcttttcatggctgtgtcgtattccaccgcatggatgggccatgttgtgttgattcattcttctgttggtggacacctgggtcgtttccacctttggctgttgggaattgtgcttctgcagacgtggtgtacacgtttctgtgtggatggatgttttcatttctcttgggcagatacgcaggagtggaattgctgggtcaagtgtgatttatgtgtgacatttccaggagctgccaagctgtcttgcagagcagctgtcccacgtcaccgtcctgccagcctgtgttcgagggccccaatttctccacatccctgcccacagtgtcaccgtctgtcattctgattctgccatcctggtgggagtgaggtggtggctcattgtggttctgatttgcatttccctggtgctgagtgctgctgggcaccttttcacgtgcttgttggccatttgtctactttggagagctgtctgcccaagtccttggcctgttttttgctggttttttagacatggtttcgctcctgtagcccaggctggaaggctggagtgcagtggtgcaatcttggctcactgcaacctctgccttcccagctcaagcgattctcctgcctcaccctcccaagtagctgggagtacaggtgcagaccgccacacctggctaatttttgtattttttatagagacggagtctcactatgttgcttatgctgatgtcaaactcctggcctcaagtgatcttcctgccttggcctcccaaagtgctgggattacaggcatgagccaccgcgcccaccagccttggcccatttttactgggctgtttgtctttgcctctgagttgagagccccattccttggcgtggcgccgttgtgagcatgttgctgttgccgggcagctcctctggctcttccagggtgtctgatgcccccgagtcatcctgtgtcctctgtctgccacattcctggtgacctggaaggtcagtcacaggactgcatttcagtaaattccctcttccctgtttagctgtgttgcacgtgcgtcaaggttatggcgcgtggggattgtggaccattttagttttctctgtatgatttacttcctaagcatgtcatttccaaaggcacaaatggctgggcatgatggctcatccctgtaatgccaatactttgggaggccaaggcgggaggatcatttcaggccaggcgtttattagcagccagggcaacatggcaagaccccgtctctacaaaaagtacaaaaattagccaggtgtggtggcacacacctgtggtcccagctagttgggaggctgaggcgggaggatggcttgagcccaggaggttgaggctgcagtgaaccgtgaccgtgccactgcactccagcctgggcgacagagccagatgctgtctcaaaaaacaatagtttcttaaaaagtgcaccaagttgcccctagggggcggtggtgggtgaagtgcctgagtccctgtgctgagagtggctcccggtgtcacggctccaccttccagatggaagggctgtctgggtctccccagcgtgggttttgatgcgtaacctgccatgggcttttgtcacctgacactgcagggtgtgctgctggcagctgtggccacgtgctttccagacgagcccccgcaaccccacgaggtgtggggagcccccctttttattatttatttatttatctattttttgagacaggatcactgtcacccaggctggagtgcagtggcgcaatcacagctcactgaagcctcgacctcccaggctagagtgatcctcctgcctctacctcccatgtagctgggaccacaggtgtgtgccaccgtgcctagcgctttcctgtcgtacagagcacaagtttgaggcatcccttgggccgtccagccctgccccaggccctgtccttcctgggcccagctggtctgggggacatgagagtgtggcaggccccatactgcataggtcaccctgtggccagtcctgtggggcaggtgggctttgatgacctggaggtcagagcctgcagaggggggtgggccagcccctcacatgactcttacttgagggcttcctgggagctgatggcccttgcagtgggttacagggaggcaggaagaggccatgtgtgcaccggcctgcagagaggcagccagggacaggggctgctgggtgcacgagggtcccagcgcctccaccagctgccaaagcgcagggggagactcatgcggtcatggcagtgccctggcatagcatgcagcccagctgtgtgccgtgtggcctaggcccacaactgcccctcgtgggcctctgtgcctcctcaataagctcagtcgaccatgtcatcatctgtgatgcacagagcagggccagggacccgggaagtgctgatgtggggaccactgtggccaccaccgcatctgggcactgtttgtggcagatccagggatggcctcaggcctttggcccggcctctgagggctggggaccagtaggaggcctgaggtgaccgcgttctgccacccagtcctcccagagggctgccctgacaggtgccttggcagctcccatcgtggctactggcccagctcaggccggcactgagggtcccacagtggtccagctgcggcctctgctccctctgagccggtggctccctggggacagtgcgcaggccctgggtgaacactacatggccacatctgggtgagagcgggagggcaggtgcagcgttggggggatcctggggcctgtggggttggcggggtcgcaggtgaggattgggtactgggacctggctgtgggcgaggggcccgctgggacagtgtggtggcctgggaggccccgcgcagtcagaggctggtctctgggcacaggcagctctggtgactgtgacaggtgccttgccttgacacacactgtgaccgtctagtctacatttctaggctgcacgtggtcacgtgccgtgcacggtgcacttggggcctcctgtgcagacactggctttgcggctgccccatgggagaagctgcgaggactctgcacagagcaagggtggcgggcagggcctcagcccacgtgggcttggagctgtgcggttttgtcaaacccagtgggggtctctcagcagcagcccagcgcggggtgtgacgtcagggctggggctcagcgctgggtatcagccctgtgtgctgcaggcagggtatggggtggacccaaggcagtaggtggaggccagggggcgacctcggctttgcttttgtcaggatggagggttctggacaccagtgcaagcctagctggggcctccctgccgtcctgctcagattcctgggtgcatgctgccctctagtgcccgcagtggggagtgccttcaggagcgggtggctgcaccttggtggctgggaaccccactcccgggactgtctgggcggctccctgccttgtttccttcacactctagatcactttgggggtcacagcgtggggaggtggattttgttaagttttttctaagtttttgggtttgtgtggacttgggtccttgtttccgaatcctagagggattctgtcgtctttctgcctttggagattgaacctgccaaggaggacccttccccagagtctgtgatcaaagtcccttcctggtcggggtgggctaccagttcccaccctgcaacacctgggacaggagggagccgctcccgcccgcagcctccgtggagaggacagtctgactccgatgtttccaggcgggtgccgtcagtgaatcacttggcctggtgcaatcccccattctgtacagggctggtgggctggtttatgacccgcgtgactctgggcagctatgatggcaggaaatgagccgtcttgggcgggcctgctgctctcctgggtcaaggttcctgctagggcctgagttctgctggcagcagccagccagccccccgtgacccacaggcctgctccgaggggtgggtccccctgcccttgagcgtgtgaccctcacccatggccgccctcaccttcgaaaacccgcagatgccgcggtctctcgtgcggatcaggctcagagcagagagactgatgtgcagcggacgctgacacacctgtggcgtccctgatacgtaaacctttctctccgaggccccgcttaaaattagcgcactggctcccggtgtcgcctcggccttagaaactaggacgcctctgcttctcgttagctgcagccctcgtgccttttatgctcagcagagtgacgaggccgctcgtggttttctcttctgccctcactcagccgcgagggcccagccgcctttgtcctcctggtggccacggtatttttagcacgctccgttctgagggaggacgggctccaagggctgggcatggcggcaccgctggttcaccctctctcgtcttcctccacaggtgtgcttcccgcacagctgcagccatggggtctgaggaccacggcgcccagaaccccagctgtaaaatcatgacgtttcgcccaaccatggaagaatttaaagacttcaacaaatacgtggcctacatagagtcgcagggagcccaccgggcgggcctggccaaggtgggtgacatcctggccccagcgcggccctccatcagcctgcgccgcgggcctgcggacatcctgggtcccagctcagccagccccacaggcgtggcctgtgcacgtggaatgtgtttcggggccactcccagctcgtttaccagcgcctgtttgtggagttccaacaatgtgccaggcaccattctaggcactggagttgagaagtggccggtgcaggccctggctccagggagctggcagggggtggtgaggacacacagccacactgcagtgaagcccaggggcagtgggccaccaggttgttctggccgtgagctgacgtctcactgagggacgccttccaggggtgttcagtgcccaggaaggccttactttcctagtaaaactttttttttttaagctgggtatggtggtgcatgcctgtggtcccagctatttgggagggtgaggcaggaggattgcttgagcccaggaattagaggctgcaatgagctatgaccgtgctactgcgctcctgccccggcagcagagcaagaccctgtctcaaaaaccaagtcagaccacaccagaaacaatctttttgagatggcagagtgactgggtcaggaaaactcaaacagggcgacagcgcaggtacatagtgaccaggagcctcctccctgtcccgacccagtcccccaccctctccctggaagcagcactgttattggttcttctctctctctctctcggcatattgtgcacgcgtgtacgtgaatacacacagcagacccccgaaccccacatgctgagtatgtacagtaccattctgctcgtctgggcatggtggcccaggcctgtaatcccagcattttgggaggctgaggcagggggattgcttgaggccaggagttcaagaccaagctggccaacacagtgagatcccatctctactaaaaatacaaaaatgagccaggcgtggtgttggtacatgtctgtggtcccagctactcgggaggctgaggcgggaggatcacttgagccagggaggttgaggctgcagtgagctgagattgcaccactgcactccagcctggacgacagaggaagattctgtctcacaaaacaaaacaaacttaaaagttggtgctgcacgtttcacggctctgaaggtggctgccgtggtccgtgagtctctgtgttcgggtgtgggcctgttcgagcagtgctcacccctcagtttggaagatgaatcgtcgttgcattttgggttcttccagttgcctgctgtttgactatcgctgttcttcctcagttaggccaggggttggcgggcagtctctacacacggccagagggtgaacgcctaggctctgtgagccagaaagagcaaccagacgccgtgtgaatgaaagtgcacggccctgtgccaatacaacattattcctggatgctggagggcaaacgcgtattgttttcacgtcttctgcttttttcttttcccccaaccacttaaaaatgaaaacaaacaaacaaaagccttcataactcaaaggctatacagaagcaggaaggggctgattcggcccgagggccgcagtttgctgagcgctgaggcctcctgcctttccgggccgcctccaccctgcccctccctccactccctggttttggtggattttgtcagtagccttcgtctctctcctagtgatccttcggtatcagactcgcattgttatttctttgtctctgagctgtagagcgagggaagcagtctcgcaccatcttttcttcccctccaagatggatgttttttctgttttgagagggggtctggctctgtcgcccaggctggggtgctggggtgcagtgctgcgatcacggctcactgcagccttgacctcctgggctcaagcagtcctccagcctcagcttcccgagtagctgggaccacaggtgtgcaccaccaagctggatttttgattgtaacacaccatgacgatgtgggaatgatggcacatctgtgtccgggtcagaacggtgggggctgctgccgtcccggcttcagttctgtctttaaaaggctttggtcctcctatctcatctcagaccgtcttctctggccctctaggccacaggctgctatcccaggaaaggcccaggtcctcctcttcctcctctccctggtgcacatagggcaggtgggacaggcgtcgcctccctttatcctggcaccgcatctgcctctgtctcctgcccttgacctacttccacatttcccaggatgcagcagccctttctggcttgggatccaaggcgtcctgatgtcaggacgttgaggggaatcagcatctcagaccgccctgcgctcttccgaggtgcctttaaatgcccgccccgtcacttcttcctcatccctcacctcccaccgggctccatgccccggtgtttccggctctctctgccctccacgtggcggccttgggtgcagcctgggttcccgggtggcctgtcctcccccgcgctggcacctccgcttcgtccctccctccctctgcctccttggctgccgcctctttgagccctcatgtcgctgcttcaggtttctgcactccccccaggccagttcccccgagattcttggcaccggcgtcttaagccagtgtggggagtatggtttccctgccttgcgttctgcgtgttccttcccatgcctctgcagcggcagctcccatgctgcttctccttgcaccagtgcagagaatcctttctcaaacccgtggagggggctgggcagtagggggccgtccgggtcccatgctgtggaggggctgtgtgtgcacgtgtctctgtgtgtgtgtgtgtgtgcgcgcgcgcgcgcgcctgcgcgcacaggagactgaggtggggaggcagctctcacacagcccagagagcttggcagctgcagagtcacgttggcacccgcatgtggcacacgcacacccccttctgcagctctgtggggacagatgggctcagggaagcatctgctctggccctgggcagccctgcgtcttccaaatggggggcccttggctcggggcagccagcctctttggagaaggagcacagtgccctgctggttctgagcgagctgtgggggtgttggggtccccctctcaccctggtctgcctgccttgaccactgtgtgtgtgcgtgcatgtatgtgtgtggtgggggagctgggggtttcctggttccatcaaaactgtgtttggttatacatcgcccctgcccccagcagagatctgcaggcccgatggagctcggtgggggcgggagctgcgggcacagccctgagagggccctggagctggcggtgccctgggtgcaggaagccttccactggagttgctgggccctccacacggggtgtccccgaccacttgggaagcactgaggtgagaggagccctggaaggccccgtcgggggtcctgttgggaggggtgggaacttccagtgcccctccacccccaccagctgcctcccaggcgggtgccagcaggggaggccctggctgccctcagctataccacccgccggcatctgcctctcactgttggcatgtggccggtcgccttcctggcctcagctgaatctggccccccaggagccccgtgtgaggcactttcaggggccgccggaggcctggaagacccgagtgtggcagtaggaatgtcccgagcggctttcagtgcctccttttcaaccctccccgcctggagccctccttctggatttgcgtctcggcagattgtgggatgtcacttctgtcctcttccgccctgcgggattttcccagagccttcgggtttgagcccagctggaagtggccctcgttcacgctgcctgtcagcacctgcctgggctgtgtcacctagagtgtggctccgtgtgtgcggcgcagacaccgtgggggtgtttggagcttcctgcgtggctcccagatgtctttactacacagtgcccgccgtggaagggacagatgagcaatgtagcccgaggcgttctttcaagagcagaggaatcgggagcgaagtgtttttgttcatttagcagactaggatcatgggcgagtttcctctaatagcactgaagaggcgaattcacggcttcccctcggccagcggctttggcgtggatttggagccgggccaggttcatggaaccctcctgcagaagcagactggggcttcctggagaggggggacagtgtctgtgtgattcagagcagtgctggcctgtgggtctctgaccataccactcagttctctgtagtaacatctcgtgtctgggacacaggcccttttgtttctgtttctcgcctttccactcctcaatgtcttcgtgtctcactgactcttcagctgctcccctgaaatctaagagaacggcagccccgcagctgccccagcaccctgccatcacacagcctgtgccagggacaggtgccccaggcgccttttgcactgtggccatagtggacatggagagtctccagaaagagccggcgctaagctggactgtcctttccttgggaccggcctcatcttggtttaactctaaattagtgtttctcttcgcttggcactgtggacttggggccgcatcgttctctggggtggcgccatcctgggcattgcagggtgctgagcagcttccctggcctccatctacctcatgccaggagcaccctcagtcgtgaaagccacagacatccccagacatggccaggtgtcccctgggggacaagaccccccctcagttgagagccacctgctcgctgcggctgctgctgctgttactgcttttgctaaagaaacctgtgcatgccggccacggaggcagcaccttcctgtcgttaacaggcacctggaggataagtgttttcattgccaagcaaaacagtttcttcactgatgtgatcgctgggtccttggggacagtaaatggattttagccgttctggaagctgccagcgatgcaggcgtcaacacacagctcttcccttggtggcccggggcgcggaggggcagcttgccagattcctggcagatgagccgaagcgggtgggttagttccttctccctgtgcagtgggtggcccggtcgactcctggaaggaggcgtggggcctgcagtgcccaccccaggactgggtgtggcagccccggagcggctgggagggcctgcacagaagggtgcctggcacccagaaggcccgtggtgcccaccggcagtctagaatctggtcttgtcggcccataggctcacccccaccagaggagggaacatgaggctggggacaaggccaggagcccagggtgaggcgtgtactccggatagccctggtccctcagctcctggatgtctccagaaagagccggcgctaacctggactgtcctttccttgggaccagccttgtctcggtttaactctaaattagtgaaggcaccgggttccggctgcagtgccgcctctgacaggtgctggtccttgtcttcctctgctgtcttctccgcgtgttccagtgtctgaggtggcccaggacctctctggggtggaagtccacgtggccgccaggctagaggtcctgggccatagtctgtctgctcaccccagggtgccccgggctgtgttgtggatcgctgtgtgcctcagtttcttcagcggtcagatgggagctctgccattcctcccacccaggagatgggtgcgctgggccccagcacgctctgcacagtgcccagctccgcacagctcctgtcctgcctcacggcccctgtcccatgtggtgctgtcaccctccctgcgcctgcacttcctgttggctcactccaggcggggcggaggcccatgggggctggatctgtttcccagtgtttcctagctcctagaacttgggttgccccatagtgggtctcagccaagtggagccactggggatagtgtctgggctccaacccctgttctccaggtgcatgtggcccctggtgggctcttggtagccagtgggtgcagttctcacttcctgctgccagagggcattgtgagctgcagcgcttatgaccaagcatgaagattcccgttttgaaaaatgccttaccagggcgcagtggctcacatctgtgatcccagcactttgggaggctgagacaggagaatcacttgaggccaggagtttgagaccagcctgtgcaacaaaatgagactccatctctagagaaaattaaaattttttaaaaaaattagctgggcatggtggtgcaagtctgtggtccccactactcgggaggctgaggtgggaggatcacgtgagtccaggagttggaggctgcagtgagctatgattgtgccactgcagtccagcctgagtgacagcaagaccctgtctcaacaacaacaacaacaaatgcctcaaaatacgagtctctgagcctcaagatgccagaacacacacacgcccagtgccacctatgtttgctgagtctaatcctgcacacacgtgtcagggttggccctggtgctgggggggtgctgtacccagcttcccaggcctggaggatggctctgccctagcaggtgaggcccttgttggctgcagagtcttctggggagtttgataaggcaaatgggggggttcctcgtgcccctggggggtgtcccgaggtgcagatcttggggggtgctggtctctggggagccggtggcacagtctgctctctggccctgccctgagggtctgagggtgccactgactcccatcttggtcttgcagatcatccccccgaaggagtggaagccgcggcagacgtatgatgacatcgacgacgtggtgatcccggcgcccatccagcaggtggtgacgggccagtcgggcctcttcacgcagtacaatatccagaagaaggccatgacagtgggcgagtaccgccgcctggccaacagcgagaagtacgcggggcgggcagggcggacctgacccccgcccccgggggcacacctgctcatgggggccctgggggcagagaaggtgcggtacacgcagcccccacagcatggccggcctgctctgtgtgccccgtgtgggctgtggcgacccctgctcccagggtggatctggaccctctcccggcctgggctgacccacaccgccctcatctcagtttcccagggcttcccagtgcatgtcgggcggtgtcctggtccccggcctgggagcacgtcctccacaccctcctgtgacacctgggcttgtggcccctcctcagagagggctccctggctccacacgggtacatgcacaggcacacaggagggcacagacacagaacacacgagggcacatgtaacacacatgggtacacagggcacacgcacgtccatacacaggcacacacgggtacacatggcacacgcacgtttctacacagggacacacaggctcatgcacaggtacacaggcacatccatgtgggcacacctatgggcgcctacccaggtacacatggcacctgcgtgtaccggcagtgttccgagtacagctccctggttcagcaggcacagccacgtagcctccgtgctgcgcaggcctgtcccgtcgccgtgccctcctctctgtctgtggcctccaccctgtctgtggcctccaccctgttgctctctgaggttcacgtgccttgtggctctggcaccagagcagagcctggtctgtcctgctcacccggccttcccagccccctagtctgtcgtctgagctcagtctttgccacacagggatgacaagagcctcccagggcctctgtcccctgcccactccccctggcgtgtgttctgatgtgggtgccccgggccaggataactgaggaggggtacgtgggtttgggccactgctcgcccgtggaagtgcgctgtcccacccggaagcaggttgcgtggtaccctaggcggggcagcgggcagtcggagcagagcccctcccgcctctttcatgggtgccctgggttccaggtggctgagggtgggctgcgtagcacccaggcctcaccctgagctggttttggggtgtttgttcaccaggtactgtaccccgcggcaccaggactttgatgaccttgaacgcaaatactggaagaacctcacctttgtctccccgatctacggggctgacatcagcggctctttgtatgatgacgtaagtatgaggctccggggaagaacagggaccagcttcctggtgggtggtggtgggagggccctgaacgggactctgccttggcagatgaagcttccaggcaggcaaggttaaccccctcgcccaggctctggatgcgggcctcgccctgtggtgacgaaagaggaagccaggctttctctgatttttgcagggcccctcctgcctcaccctgcagcccccaccctgagctcaccctggccccacctctggcctcagcagccggcccacagcgtgttacaaacacgtgtactttcccagtccctgccgctcgtcttcctggcactgtggagcctcgagtcctcagcccgccaggccacctgctggattcggctccaacccggtcctgacttgggctcagggcccggagacactggggtgaggggatctcccatcccgagcctggtctgctggagcgtcctcttgtccacacagcctgggctctccatgagggcagctggccggcatccccagagtcccagcctcaggcataaggtcccccaggccccgctggacgccagaagtgggcctgcgtggcgggtgtgtgtggaacagcagcaggaagctgtgactgccctgaggccacggccagccttggctctgccctgcttagtggaccttgtctgcgctgtggcccgcaggggactgggtttgctctctgagccgagggcgccggtttatgacacggaggattctgttcaggctggaagtgagcccgccctggagaacctgagggagacgcccccgacatggagccaggcataagccagccttgcttccggccccaccagaagcaaacatgagaccagagtatttcgaatttgagattttctttttttgaatatttgcatatacatcctgagatatcttggagatgggccctaagtctggattagtctgttcttgcactgctataaagaaataactgaggctgggcgtggtggctgacgcctgaatcccagcactttgggagactgaggtgggcagatcacttgaggtcaggagttcaagaccagcttggccaacatggcaaaacctgt[132 bp omitted]gccccgcagcctgggcaaaaatgagactacgtcacaagaaaaaaaaaaaaaaagaaggaaacaaacacctgagactgggtagtgaataaagaaaaggtttaattggttcacgtttttgcaggctctgcaagaaacatggcttgggaggcctcaggaaacttagagtcgtggcaaaggtgaaggaggagctgatccatcttacacagcaggagagagtgagggggggggcgccgtaggcttttcaacagccaggtttcgcgagcactcactgccctgaggacagcaccgcggggatggcgctgaaccattcaggagacatgagcaatccacccacggtgcagccacctcccacccggccccaccgccgacaccgggacctgcagttccacagactcaagtctaaacacaaaattcatctgtatttcgcgtacactttacacacgtagcttgaagataactttacacaaagtttttaataattttgtgcacgaagcgaagttttgactgtgtcttaactgtgaccggtcacatgaggtcagctgtgaaagttttcacttgtggcgtcgttatcggtactcagaacatttgggaccttggagctttttgggttttggatttttggagcgggggtgtcccccttatcccgcacggcgtttatcggagtggggtgtccaccttgtcccgagtggtgtttatcggagtgggggtgtccaccttatcccgcgtggtgtttattggagtggggtgtccaccttatcccactctgtgtttatcggagtggggtgtccaccttatcccgtgctgtgtttatcggagtgggggtgtccaccttatcccgtgctgtgtttatcggagtggggtgtccaccttatcctgcgcagcatttatcggagtgggggtgtccaccttatcccgcgtggtgtttatcggagtgggggggtccaccgtatcctgcgtggtgtttatcggagtggggtgtcaaccttatcccgcgctgtgtttatcggagtgggggtgtccaccttatcccgtgctgtgtttatcggagtgggggtgtccaccatatcctacgtggtgtttatcggagtggggtgtccatcatatcctgtgtggtgtttatcagagtgggggtgtccaccatatcctgcgtggggtttatcagagtggggtgtccaccatatcctgcgtggtgtttatcggagtgggggtgtccaccgtatcctgcgtggtgtttatcggagtgcagtgtccgccatatcctgcgtggtgtttatcggagtgggggtgtccactgtatcccgcgtggtggttatcggagtggggtgtccaccttatcccgcgtggtgtttatcagagtggggtgtccaccttatcccactctgtgtttatcggagtggggtgtccaccttatcccgtgctgtgtttatcggagtgggggtgtccaccttatcccgcgtggtgtttatcggagtgggggtgtccactgtatcccgcgtggtggttatcggagtgggggtgtccaccttatcccgcgtggtgtttatcggagtggggtgtccaccttatcccacgcggtgtttatcggagtgggggtgtccaccttatcccgcgtggtgtttatcggagtgggggtgtccaccttatcccgcgtggtgtttatcggagtggggtgtccaccttatcccacgcggtgtttatcggagtggggtgtccaccttatcccacgcggtgtttatcggagtgggggtgtccaccttatcccgcgtggtgtttatcggagtggggtgtccaccttatcccgcgtggtgtttatcggagtggggtgtccaccttatcccacgcggtgtttatcggagtgggggtgtccaccttatcccgcgtggtgtttatcggagtggggtgtccaccttatcccgcgtggtgtttatcggagtggggtgtccaccttatcccacgcggtgtttatcggagtgggggtgtccaccttatcccgcgcagtgttgatcagttcatccgctgacggacatttgggctgtgttctctttttggctattttgaataatggtgctgtgaacgtttcttgtgtgtttgtttctttgtctttgagacagagtcttgctctgtcacctaggctgcagtgcagtggcgcaatctcagctctctgcaaccttgcctcctgggttcaagcgattctcctgcctcagcctcccgagtagctgggattacagtgtcacatggagtcatcccaccactctaatgatcccctgagctccccctcgtcattcctccctctcccccatccctctcctgcgccccaggcaaccactgatgtctcactgtctccatagctcagccttttccagaatgccgtgagctggaatcctacagtcggtagccttttcccattggcctctttgaccaagcaataggtgttcaagtttgctccatttttcatggcttgagagctcatttcttttcagcgctgaataatactccatggtccgggtgcaccacagtgtgcctgctcattcacctattaaaggacccttccaagtttggtcaatgtgggcagaagttttcatctcctttgggtaaataccaaggagtacagttgctggaccacgtggtgagaggacgtttagttttttaagacgccaccaaactgtcctcccgcccacctgtcccactgtgtgctcctagcagcagcgaatgaacgttcccagggccccgcttccccgcccccatctggagttgtcggtgttgtgcatcctggccaccctgggaggcgtgttgcgctgtctcattgccatttcaatctgcattcccccgatggctgccttcgcggcggggcccctttgcatgcctgtttgccatctgtgtgtttccttggtgagctctcttcatgtcttttgcccagtttgttgttgttgttgttgttgtttgagatggagtctcgctctgttgcccaggttggagtgcagtggcgtgatctaggctcactgcaacctccacttcctgggttcaatcatttctgtgcctcagcttcccaagtagctgggattacattacaggcgcccaccaccacacccagctaattttctttctttttttttttttgagatggagtcttgctctgtcaccaggctggaactacggtgcccaccaccacgcccagctaatttttgaatttttagtagcgatggggtttcaccatgttggccaggatggtctcaatctcttgacttcgtgatctgcccgccttggcctcccaaagtgccgggatttacaggcatgagccaccatgtccagcctaatttttgtatttttagtagagacgaggtgttgtcat[134 bp omitted]ttctggttaaatttgagagtttgctgtgtattttggttatcagttgtgacttgcaagtattttctttctgactggggcttgtctttctcttacggatcctgcctgattgttttcaagtgaaagttcagcctcagactccagtgcatgagagcctctgggttggctggcctgcactgcctgcacttggcctgtagtgatgacccgggagggactctgcagccgcacgcaggctgtgccagcccaggccgacctgccacaggtgccaggggaagcttcagggcttccttgccatgtgtttgccatgcctagcctatgcactagcctacttttacagcgggggaaacagcccacagcagagaagcgacttgctgtggtcccaggatgaatttgcgcccagctcagcctgtgcctggggcctccctctgccccatctgggtctcatcactgcctccctcctcacctcttctgggctcctgccagggctcaccttgcaaaggaaccgctggtcttgccaagtctgagggccggtcgtgcaggtgcaggaacagctggtggggggtggattcaggctgtgagagcagctcacgttcatgtgtgtctgggctcctctcggcctctcagcaggccatgagcctctccggggactgcagtgactaatgtgtattttatgagctcttgggacaggacggggtttgtttgcttgtggcattaagaatagatgtgcctggtgggtggggattccgtccttgtttgcctagttctgaaaactgtcttcgtctcctcggtcagaagctgtggaagggctgtcactgggccttggctccggtaccatcgctgggttagccccaagtggtgactgtttttctccttccgtgtcattgacttagaggcgtgttaattatgcactcccaaactgcaggcttcacaacaaggcctccacccagcaggaagcacgcagctcagtggaatctgacaggccctgcctgcctggtgcacgctggcatgtgcgatggggcccttcctggaagggccaagctggcggtgagcccttcagaaaaggtgtctgggctgggtatggcggctcatgcctgcagccccagcgcttggaggggccaaagtgggagggaccattgagcccaggagttcgagaccagcctgggcaacagagtgagacttcatctctacacagaaaaaagtaaaaattagccaggtgtggtttctcacgcctatagcctatagtcccaggtactcaggagactgaggctggaggattacctgagcctgggaggttgaggctgcagtgagctatgattctgccactgcactccagcctgggcaagaatctcacacaggttaagaccagcccctggtctgcagggtatgaccggcccctgggggggccgcagatactggggtggaggaggatgggcagcgacccctgggactctggggagaattagcctgcaccccagggctcgcaggttctgggggtggccgggcggttgccgacgctgctctgccgccccacaggacgtggcccagtggaacatcgggagcctccggaccatcctggacatggtggagcgcgagtgcggcaccatcatcgagggcgtgaacacgccctacctgtacttcggcatgtggaagaccaccttcgcctggcacaccgaggacatggacctgtacagcatcaactacctgcactttggggagcctaagtcctggtgagtgtctgcactggccctgccgccggccggaccgagagcccctcgggagggagtcaatcccgggtacacggctgggcgccgtggcaggggccccaccaggtgaggccgcaaaggtcggcctatgacggctggagatcttccggaccgcctggggtcacccaccagctttggggtgggggatgtgcacccccagagccgaagctcccaggcccctagagcttgcgctttgtaccccggagtgccccccattgagctgtgagcggccccaggtgtccccatggccaggagcgtggtcttgagcctcctgagctgcccaggctgtgctgcctcacagccaagtggagacgttcctggtgaagggacactgtccatgctgcccagaggggcctggccaggatgaccctgcagccgctccctcgcagtctccgccctggcacgtctgggccaggccctacagttaggagggcagggcgtggcgctgcaggcctgtgtgcagtgtggtggacctgcccctgcccgggaggtgccgggtgcagcgtgggcgctgctgtggcgggctgagttccaggaccttctcctggctccctgtgcacgtcgcagcgaggccgtgtgggggtgtgtgtgaatgtgcacgtgtgcgcgcgcatgtgagtgcgcacgtgagtgagtgtgagtatgcatgcgtgtgtgtgcccctgtgtcaccgggctctgcttgtgactgcggaacctgctgggtgctccgcggggctgccctgcactgtcctccaagggccgctaggtggcgctcccgcccttcccggggccgcgctcatgcctggaatcttcccaggccgtcctcgcgctggaggaggacggagcctttgcctggagggcgtgggagctccgccttgcctggcccttccctgggttggagttgtaagcggggagaggggggggcgggggagaatgctgtacctcttcgttaaaaaaaagcacaatgagcaggaaggggcgagctgtgcgcatcctcacctgcgtccgaagcgcagatggagcccaagggaaaggccctgtagaggaccccgtgtgacttggggcaaagcgtggcctcccaggggtgcgtgggcagcgggacgcccatggtgtgaccgggtttgtgcctccatagggaccgtctgccctgtgcagagagcccctgtggggcgggaagtggcgagcagccggcaaggaggcccagccagacagaagcaggggggtcagggacatgggaggtgggggaccagccagtgagtcagacgtgaggacttcagtgccaaggactgcagtgccagcagctcggtctcctgtgaggggccccgggggttgctggctgtcgtgggagcctgggctgggggagaccctggggctggggctgctatgggtcagatgccagggccgggggtgcctgctgctaggtcagaggggcctctgcgggaggaggcgacagtggctccctggaggcggcagtggggcccggccacaggccgtcggagggactgacagggatgcgccaggagccgagggcctctcctgagctggttcatccaggacgcagcctctgagggcatcccgcacctctccccgaatgcccctcactgcacccctcctctgcttcgcctggtgccgcaggcgtccagctgccactcccatgtctacccttccccatgacccgtcgtgggagatggctcaggggagacagctggggcggggcagcgttgagtaggcaacagttctttcgggaagggaattccggaagcgccctgaccttggtcttggtttttgcccaggaaggggtggggatggcaggggtggggcctggcatgaggggcctgagaggagccacagtgtaggctctagctgcagggcatgccctcaaccccccagagctccccactcgcccccacagtcagctcagcctgcttagcacgcagggccccttccctgctctctcaccagggctgaggcggggccccagatgttcccacgacaccccatgcctgcgacaggcatagaccaggtgaccccagcattagccaacgtctactacgggctatcagtcctccccagcagatggtaggggccctggtcaccccgtgtcccagctcccagcaggggcctggcacagagaggcttggtgacttgccggagcctcttggatcctcactgtgtgctgtgggagctgactacccctccaggctgccctcccaacttgcaggggggtggggacaaggtaactggaaagagtgtctggcctctggtccctgggctggggttcaggaagctactcaggcccctgggagatgcttcccccctctcccttcctcgggcccttggggtaggtagggctcccagccaagagatcaccaaggctgcgccccgtctgtctccctcattacactgttccgcttgcatctgcagccgcttaattgcaaccatttcagagtattccagtgggattttaaagaaagtgtcaatgtactcaggtttacagcattttattaaagctttctgggtctgttgctactttggtagcttgatttgtgtgtcaaagtgacgtgaacagcctggtgtcaataacaggcagaaacatgcttcaaaaggctggcttctgtggtgctctcaggcagcggggctaagaatatctgaagagactgagcgcctcaaaatctctttggcaatgcggattgaaaccagagccagcacctgcaacttccccccgccaacttcccgcagccccttctgtcacccaggccgggggggccggagtgcaggtgggtgtggggagggtccgagctttccacttgaccctgtattccagggtcttcctgggtggggtggtggcctggggtcggtgtcctgaaggctgtgccccatagaagccactgtcccaggccacactccttgccatagatcaagactctcctggggccaggcgcggtggtttgcgcctgtaatcccagcactttgggaggct[134 bp omitted]gaggcaggagaatggtgtgaacccaggaggcggagcttgcagtgagcggagatcacacccctgcactccagcctgggcgacagagtgagactccgtctcaaaataaataaaaaataaataaataaaaagaccctcctggaacctggggtgggggtggtttagccgagctgaccctccaaggccggtcctgcggctgttcccctccaggcatcccctccccaacctgcacctgtggcagcccctgcagggcccaccctcctgagccgcccgggccaggcacgaaacacaggcgtcgccacgaggctgagcgcagtgtcgccagcagcatcacatgccacatgcccctagaagagagttccaggccggggtgggaggatgttgggtctcggccagccctgagagagttgctggtcccagggcacttctgggtcattcggattgtgctgtgcaccccaaagaagagagtggagtggccatcccccctcgagggccctggcccacgctgcctgggaaagtgcccactgttcagtcctgtgcacccatgtgccgggctgggacctggccgaggcttcgggtccccttttgcccccaacccatcagacaccctgcagggcagtgttggggtgtttaggggactgtgggccaccgccaagagcagaagctttggctctcactgcagcagggaagccagatgggggatcagcatgttcctggggctgcagggactcccgaggacgtcgtgagctgatgggacatggtcagctgcttgcactggctccaaggcggcgagaggaaggccctcctgaggagtgccgcggggccagcgcaggtgcgtggcagccacagaggcctctgctcaggcttagggaagggggtgtcccccagggtctctgcagctccgcttgtcagaaggggggtcatcctgcacccaggtgaagcccccaagagcagcggggcgaaggagcgcttgcccggactgcgaccttgacctgcccatgacccgcggcagtctggaaatcccccattgccccaggcaggatgggggtcccccatggtctcatctctggctgtttcctcaggggatcgctccgcccaccctctcctgcctctgtttaccttggacacactcagtctccggtgcaggtgtgggaggtgggggtctcggagcttgtgctcccgtgaagggcacggagcccccagttgctcttggccatcctgggctgctatgagccagaccctcctgagtgctgcggggagggctgctggggaggccaggggagaggggattatcagaagactccaccagcctcccttgacctttaaggagctgcaagccgagaattttcccttttgattcagctacaccttgagttttctctctggcgttttccctcatgggaatttcacagcatcttttcttcttgctgccagggaaacttgagtcctagcaggcatagccgtcttttgcttcatgggtgtccctggaggtgtgcgtgcatgtgtgtgtgtgcatgggcgcatgtgtgcaccgaggaaccgtgctccagacactgggggtgggggtggggagggtgggggtggggagggtgggttccagggctgcaggggaccagcccgggcttcctgccctgtggccgcaggtgggtggaaggcagagcctggggtggatgagtctgtcgcccacccaggccaagccaggctgttcttggggtggaggctgcgggcctgctcccttacccctctgctgcccgcctaactgcccctcaggacctccctggcccacccgcctcccagctccatctcctgctggcagctcctgcctgggggcagacacctccctccctcctgggctccctcagtctggctgcaggtggcactgtcgggccccacaatggcctctgccctgtcccttggagtgggacccaggagtctggtgggtgatggagctggcgagcccgtcccaggcagcagcctgaaggcccatggggtagcgcgctggcgcccggggaccctggtgtgggtttgtactgctgctgctggcgagccaaccactgggacttccagcttctgagcccgggacccggggggtcccaccagcagtggggacctagggtcccagtctactgaccgtaaggcatggcccccctcagtgacctggggcattcctcccagccgctttgctctggctgggccaccagaggttgggtggccgcagagacagctctggcggagattggtgtcccgacaggggtggcgtagcctgagctgagcactgggttgaaatggaaattgcctggagcctgacagcttcacagattggttttaataactcagcttccccacactgcactctgtcaccagaacaagatgcaggagcgagatagttgctccctcctctccttgccacccgaggcccaaccctggcgagggtgcctagggacagggctgcattggcagctcagagccgctgcggtgccctgggaggtcagactgagaagacccaccagactgatgggggcagcccgatgcgtgcctcgctcccaggcaggggaccgcagccaggtctcttcccagccacacacactgagccaggatgacagaaatagaaaaggaagaagcggtttagaacagagagctcccacggagagcagatcagaccagtagggaggcagagggaccctggtcattagaaaatgataaggtgtcaggagccaaggcagcttgctcagggcccaggttcctgcccgccaaggcctcagcacttcctccctggctcactgagacccgctgcagtggccccagcccatggtccctgggagccgtatccttgtagagacagctgtctagcctgcatgaggttatctggggaggctcttgatgaggggtgtcccctctctgcagaaggaacctctttttgagagaagacagttgttgtcacaagcaagtgaggcccccaggcccagtgcccaggccagctgctacgcctgagtagtagttgccaccagcccagaccagccactaccccccagcagcgctcagcaccagcccaggggcccagcgtcccggctgactggctctgggtccacatgggttgctgcgtggccaggcacacctggtgcccagcttccctgtttgaggagcgtggccgtgggcaggcaggaagctccttcgtggtcacctgtcccaatcctctgcttctgatggcgactgtggccacagcatcagtgcagcggttctttattcctgtgcgtgagtgggcctcagtgaccagctcagctctcctagctttatttattttattttagatgaagtcttgctctgtcatccaggctggagtgcagtcgtatgatcacacctcactgcaaccttaacctcctgggctcaggtgatcctcccccttcagcctcctaaatagctgggaccacaggcacgtgcacaactggcaaatttttaaattttttgtagagacggggtctccccgtgttgcctgggctggtctcgaactcctgggatcaaatgatgctcctgcctcagcctcccaaagtattgggattgcaggtgtgagcccaaccctttcccagttttaaaactggaagtcccatatcctggaacctgctcagatccagtgaactgtgatgctgagtcccctgagagagagagaatgtgtgtgtgtgtgtgtgtgtgtgtgtgcgcgcgcatgcacatgcgtacacatgtacatgtgtttgttagagaaacaagggtctccagtcacatagtctgtctgggagggagtctggccccctgggactctgcccagaagacgagacctgggagtctgctgggtaactgagaactggactttacccacttagctgcgagaactcgggccaggagctgagctgccagcagggcattgcagccgtgtggcctagagcgtggcgtgtggcgctggtgccgtgcttgggtaagtggtccaggctgcggccaggagggccggcacatgggagctatgaatggcagctgtgttttccctggcctggtcccctccccagccctcatcatcgagccctctgcctcgctcttgtcactaccactctgtcggcctgacgccatcagcccaggcctgcttatcaagactggggagtgaactgagcaccagaagctggctttggcgttcaaaaaattaactcgtgatgctgcaaagacctttgagcctcacactggggcgtccacagcgaggctgggattgcatctctgcgcctggcgtgtggggcacaggtgccagaatcacagcttctccggctggcctgatcagcctcctgccaacctcactcacgttaagcaattgcggcccgattgtgcccccaggacaggcagggctctcagctgtgtctcgtgatggtgtccccaaggactgggagaacacctctcggccagggtgaccgggaaacccggggcacatcggggcactcaccggggctcccaccgtacctgtcagtgggatctgtcccagcaggctggctcctggctcttgctgggagctggcagggacagacacagacacacttggtgtttgttcggggactgcagagcaattttcatatcgccttttgctgtgtgaaaatcgcactccaagctctcctccagagccgtgccactgagctggggacttccggtgtttggatggtcgattgccctgtgtgtgtctggacagcaggcaccgttgcccatggatttgggaaactggcttcttggtgagcagagatggtggccgtgatgggggccgggtgggcaccccgcagcaggcgagtgtcaggcggtgggcccgtgatgggggctgggagggcgccccgcagcaggcgagtgtcgggtggtggccgtgatggggactgggaggacaccccacagcaggtgagtgtcctgcaggtccctcttctcattcttgtcccaggcttgtgcttgtgtttttcatccactttttggtgaagtcttctccccctttctctctctttaaataggtctttattagacctgttttagattcactgaaaaagtgggaaggtagtaaccacagagagttccccaccgggttccctgttatgagcattctatatcaatgtggtacacttgtgatcattgatgggccaacactgatgcgttatgaactaagatccattctccagatttcctctgtcttcccccgttgtcttttctgtcccctgaacccatccgggtcccacgtgatgttgtcccgtctccgtagggccctgggctattacggtgtgtttgatgccctggacagtgttgaggagggctggccagggagtttatagaacgtcccctaatctgtatgtcccctaatcagcatgtctgatgtttttcttgtggttagattggggtgatgggttttagggaggaagaccacaggggcgaagggccctcccatcacatcctaccaagggtcaaaggcgcagccatcagcgtgatgtcactgctgatgttggccctggtcacccggcttgggtgtggatgtccagtgtctccactgcagagtggcactcccccgctttccatgctgtcatctgtgaatgtcaggcccaccaggatcatctccctttctttcttttttttttttttttttgagatggagtcttgctctgttgcctaggctggagtgctgtggtgtaatctcggctcactgcaacctccacctcccaggttcaagcgattctcctgcctcagcctcacgagtagctgagattacaggtgcgtgctgccacatttggctgatttttgtatttttaggagagatggggtttcaccatgttggctaggctggtctcgaattcctgacctcaggtgatctgcctgccttggcctcccaaagtgctggcgttacagacgtgtgtcactgtgcccagccacctccctttcttaaggttaactgatttgggacctttatcacatcttcgagaccctcacggcagcagcacggggcatgtgtcactcgaggagtgtgggagccctggggcggggagtcctggggtgtctagagccctggggtggggaccctggggcggggagtcctggggcggggacgctggggcggggagtcctggggcggggagtcctggggtgtctagagccctgcctgtcccggggcttcccttttgtaggcatttcttgctgtgaaacatgatttggtacagaaacggacataaagcatgtaagtaccagatatatatgcgtgtgtgtgtgtgtgtgtgtgtgtgtgtgtgtgtgtgcgcgcgcgcgcgtatgttagcaaatgactctccggctgtcccctgtgtacctcgatgtcaggacacggcccccacctgtgcctccttttcccagccccctctgcacactgtggtggtggcttcctcccggctctgctggcggcgcccttgcctctcccctttgccaggccgcgtgtgcctgtggcccgggcagtgaggctgtgtgttggctgcattggaaggtcttacaaatgggctgatttccttgcgtttctgctcaatggtgtgtgtgtaagattcatccggttgtgtgtggtggcagtgcactcattgtcatggctgtgaaattccccactgtatggctggactttagtcgactttttccattctgccgtggacggacatttgggctgtttccagcatgaggcttctgcgaaagacctatcatctcttcacctgctgctcatgtaagaaattcattttgatcgtaagccttgctatcagtaactgtgactggggctgcatttatgatgttccgttcctcatgcagcagctttgcctggagtaaccctttgacttgtgcccctggctccacgtccttgttcacggacgaggcacagattgaagagacgtccgatctgcccttgaagcgctgccctgtgggatcaggagggcagcgggtcctgggagcaggtgccaggacgatgtgcagccttgaggacagggtgtgtcccaattggcgagggtggcctgaacccgaaggtgtgggtgaggaaggagccatttctaatggagtcaccatattaagccctgcttagccaaacttgaaggtgacagtttgttgtgggacatggagatgatgcagggatgcggggaccgaggccagcatgtgtggtgtccaaggtcgccctgggtgctgctgtgtaggtgagggaagagggactgatgggctgcttagggggccatgtctgagggcagggcccaccacttctgcccacacctcattggccagcacccagtcacgtggccacaccttgcatcaagggaggctgggaaatgtagtctgaccacatgtccagctgggaaggggcaggtgagacttctctttcctgccatgtgggtgctgggtgccctgcaggggctcagccaacagggtcttgaggttgaagagatggatctgcccaagccctgacggagtgctcatgcctgctcagggcccagcatgagctgcgtcaggagcagaagccattgggaagggcttttggtgtggccgggcagccagacactccacgcgcaacccccagagcagtgccaggcccgggagcccttgggatggaggcagggagaatggggggctctgaggactgagggaggaggggagcccggtgaggggaggatgggtgaccagctcaggagcaggggcgggaagggggcatagaagcttcctaagcaggggagctactactcttggccatgttccaggaggatggagtggctgtaggagcaggctttcgggccagggcctgggtgtggtgggagccggggctggctctggaccctgcaggggctgccttagcctcacgctgtctgaccagcccctgcctcacgtcgtgtgctgagtcctgtctgcggcccctcgctcacccgctggcttggtctggcaggagcagatggccttcattttggagtcttttgttcaaagcgggcgcttcgggttggagtggcagtgcacacgctggctcgtgtcgcttgtgaggctgcaggatttttgttttagggaggtaggagccaaacaaacctggcgcccgcttccaggctgtggcatgccaggcgagtcaccggcatcctgtccctgcccaccgctttaagaaactgttagttctgtttgaaatgtcatcactgggcgtgaattcccatcttcagataatcccgccaggcggtgtttggatgaggagtttattcaggctgtgggggtctgtgcgtgcccgcgggtccctcccactgcagccggcgaggctggccctgacccagagtcgcccgcccacccagtctacgtaggcattagaggtttgggttctgagctcagggcctggtttccatggcaaatttctctcccttcggcgaggctgctgccggcggggttcagctccccagaagggagatggcagcaaatctgcgggaggagagtcttcgttatctttgcttaaaaattgggcagcgcatggcttcctcccctccacactcgccagcagcaggggacaggagcgctggctgccttctgatgaaacggggcgggcgcaggatggggccgatgacagcgatgctaatggccctcattcagcagcctcccgccgagggctcgggccgcttgttctccctgacctgattgcgagccaagcagacttaacccgtgtgtgagccaaaccctcccggagctccagagcccagcccgggtccccgaggcccagggagggacccagcatcctgcggcctctgcccgtggtgggcacaggctgagacttaggtcataggaacaggagcgcgtagcctcatggccatcggcctgtgtgtgagacagttcaactcccgtgctctccaaagctagtcccatcattacacgcgccatttaggacgctccaggccatctcggtcaccaggggcctggcggtcaccgtgtttcctcatgaggctcagtgggtgctgtgtgtctgtgggtgccggtgatgaaataaatgtaagcatagaggcatcagagcattttaatagatgggagcctccacagcctgcaggtatccagacgacgttctgcacacagagactcagactcccaccagggcctcacgccccactgcctctccgggatgcctgcgtgtggctcactcccaccacgggcacatcagccctggtgcccagctggccttctgcagagcctggtgctggagcagcttctcgaattctctgctgcctcctccccacagccttccagggcctcagagctgctgccaggccagcacctccttgggcccgtgttgaggccccacggggctgggctcatgtgggagctgatcttgg[138 bp omitted]tggtgaaaccccgtctctattaaaaatacaaaaattagccgggtgttgtggtgggtgcctgtagtcccagctactcgggaggctgagacaggagaatggcgtgaacccgggaggtggaggttgcagtgagccaagattgtcccatccagcctgggtgacggaggaagactctgtctccaaaaaaaaaaaaaaaaaaaaaaaaaaaaaagggagccatgattgttctccagctgcagtccctgtctcttcagaccctctgtgctcttaggagactgtcgttgttctctcctttttaaaccatcctgtgccttttaacagaataaacggcaaggggtccccactgaggtcgaataatgctggaggagggccgtgggtccaggcatggtgggggctgcctcctggttgttgatgagcagaaattcaggccggtttgacggcaggcacgtgagggaggttgctgtgtgtcagtggccctgtgtccctggcactgtgtccgaacctgacagccgccgctgtgtcactgggcacctgccctgcgcaccctcccctgtgacgggcactctcacagctttcctggcgaggctgagggaaaaacatggcaaacaactcgcacatgactttgcgtttttggccttgtcatataataaaagtaatttgtgggcctaaaataaatcagggctggggatcagatgcctccaatctggcctttaattgcaggcgtgacatggcttgcctcggcgagtctgctcctaattaaagtgggctggcggtgtatgaagttcgcacggatcctcagggtgctgacccagccccggttccggagggccagtgtgacgacacctcgtggcccaggagagcagggcgggccacccatggccaccgtgccaggaatggggtcttctggctggccctgcgagagccgagagctctgtctcctccgcctgctgctccgctttgtcgggcattcctgtgggcggctctccccatcccaggctccccatcttccctgagccgaggctcccaggactctgctggtctcctgtgtgtctcaataaaaggtcattatttgaaatcattgtcaccactggtttaagataccaaattccatcatctcttgtcccgtaaaacgatccattaaagataaagccactgcagctcaataaggctgtttcctgggaacaagccaccctgctccctggcagatcctatctcccaagcaagtattagtatctgccacataaaggagcccctgtgctggggacaaatgagggaggtggcctttccccaggatgaggctccatgaaagaagatttttccagtagaaacaggcaggttggctcatgcctgtaattccagagctttgggcagctgaggccagaggattgcttgagccagccactggagctcgagaacagcctgggcaacattgcaagactccatctctacaaaaaaagaagaaaaaatcagctgggtgtagggcgcacacctgtcatcttttagctacatgggaggctgaggagggagtattgcttgagcctgggaatttgaggctgcagcaaagaccctgtctcttaaaaaaaaaaaacaaaaaacaacaacaaaaaacaacaacaaaaaaaaacagaagaaagaaatagggtagctttccatcagatattggaggagttctgtcattgccttgggaggagccgtgcagcccaggctgggctccatttctgcagcggtggcatctgggggagcagggctggccccgcagaatgccagggctggagccttccccatggggcctgcacctgctctgggactcccgtttctcctgtgagtctttgcgaaagggtctcactcctcctcttcctgccctctgtccggtcccctgtaatctctccctcccagcaggctgcggttggtgacatctcctctccctctctctcagccaggatatgggacctcagtgctcttggcagttcccgggctgtctgtgtgtcctggcctgtggatccactcccttgcctgtgcaggcactttttctaacatctttatctctccagactgacctgtggggcagctgcctgtcctgggcgacccatcctcctggggtggccatcggtagcatgcctttcctgctgctggcgactacgtgatgagctctggcacctgcccttcctcccgtccgtccccatgcgctgttgcaggggtgtggaggggttttacccagggaggcactggcttcccaggtcagagcctgtgagtacagcaggcaagtgcactaccaggtctgtgtgtggccttgtttgtggagagaattcctgctccaccctagacgagggacaggtttaccctagtgggtttagagtgttctgttaatgttctttctgctgtagaggaaaccctctttttgttgacttttttttttaattaaaaattctgccaccttgctgggctgtgtttaattctatagttttaccagtttctttgtttgcttagatttcctaagtagaaacttatgttataattaaactgttttttttttttttttttttttagagatagagtttccctctgttgcctaggttggagtgcagtggtgcagtcatggctcactgcagcctcaacctcttggactccagtgatcctcctgcctcagcattctgaggagctgggaacacaggcatgcaccatcacgccttacttagacgtttatattatgattttaagaagtttgtcttatcccttctgcttggtaaaccctttgtctttttcttgatatatcacattggctagtgtctctagtgcagtgtgacgtgtgctgtgatgatgggcaggttgtgtcctctcctgcctcgccatgaaggtggtagtgggagagtccctgctagtcctggttgcctgagaatttttgtaccaaatgctttggaatttttgatagatattaatttttggaatgtctttgcaaccttggagataaactcttcttggtcttgcaatagcctactgtgcttgactcactaatgctgtatttaggatttttacatccacgtgggactggctgatcattttcttgcgtgttctttgttggtgctggggtttcccatttgttcatttattcatccatttggaaaatatgccggattcagaaaacgagctcagtaacgtcagatattccctactgcttgccaaccatgtgtgtacatgggcactgtccctttagatgaaggtcatcgggcaggattcattaaaaccacctgggctggtgccttttccagagaggacatctgtgacctggtctcttcagggtttctggtggggcctgtgttgacttggtggacaccctgggctccacagtgctgaagatactctgaagagccaagtgcatctgtggcactgagcccagcaacgcaggcagggaccgtggctctctggtccttgtgtccccagtgcggtgaataggtcctcaggttcctgtgaacagctttgtttgtggtgcagtttccatagcatacatagaaggcgctcagagaacttggccatttccgtggacggagttaacacggcgcagcacggtggccaccacacagacctgtgtgtccctggcccggtcaccatgcggctctgaggagcagagcagaggagccaccctggcccggctcgtctttagctggctccgggactgcatgtcggctgaggggctcgtgtggatgtggggctgagacagcagctctctgttgggtctcgcaggaagcccaccctgtagccggcttgctctccttcccggcctgtgccagccacagggcagtgcgccagagccatcttgctgggtcacaggccggggccaccatagggctttgttgcgagggtggcggtcaccatggcttttccgttctgtttgcaacttggggtcccgggggcgccactggcgtttggatctgccgtggccctcctgggcttgcgtgggtggctcactctgccaggtggcctctgtccaacctgacacctggtctcgggtacttccagcgtgacgtgcacgggctctgcctccctcattctgtgtctgcgatgatagcgcattaaatggcgaaggcccgtctgcccaggcctgtgcagacactgtgaaattaactttctcaccctccagcacgcattgggctgtgccgacatctctgaagggctcttggtcggacctctgctcttggcacacattcctcggcggcgggggtggggggtagggaggagagcgttttcatccctggcacctaattgccgagagcttccgctggcaggagctgtcaggctgggccgtgggttggattccaagtgccactgtcacctgggagaaagctacacgaatcttaaaaaaaccttacactatgatgtcccgttgcctggttcagagccatccacagggaccaagcaagatggtgccaggcaggggccactgccagaggtgagggccacagagtcctggcttgagagcctccaaggagcccattccgcttgcagtaggagggagagggcgctgggagtcacctggtcgctctggaagtgccgcccaggtagggagcctggggcagccggcaggtgtggtggggacatgtgtggccggcaccagcatcacacccctcatccagagactttgccccgatctcgggttttctgcctggtctgagaggcagcggccctgctgtcattgcctgcccatggctggcaaaggcagaggctgtgaggggacaggatattggacccccacctcctccgcctcgggttccgaggtcaggtgcggtgtgctttggccgtggcaggcggggtccctgggggtgctggggcgtcagccaggcaggcagtgcccacaggcgaagcaggcagccccactgcgcagcgtcacctagcacaggaggggccacagcgcctgctttgcagagaccagtgggggccacgctttcatggagccacatgtgggcccgcctcaggctggggccctgtgggatggtgcccaggggtggcctgggccgtgtgaccccaagcccgtctgctcaccgtcatcgtagctaagggctccctggcaggtcccagctgcccaggacggcctgtgttccctttcctgacacactcatttaatttttaactcaaaggcatttgcttatttattttcattgttcttgataataattctaagccattagaggggaaaattatattcaaaaatgctgtttcacactttatttgtttgatgatttagagcgatagaaaatagcacatttgctggcttttatagtctgataattattcacatccatcaagccattccgggggaataaacaaaacaccaagaaattacactattaatagcatcctctgcggtggacagaaaactctttccggggccagcgtggcggcgagatgacagtggcctgtccgctggctggaggggagcgcctgcctgcagagaacgcctttgctttcattccctggttccggctccagctccggctccggctcatgagctgcccgccatccatcccctcctctgcacggccgggggcttctggggcccatggcaaaggttcgcccacccgtcgccaggagcccctggggaatggcgcgagcagaagaagcaaggctgtcggggcctcgcagcatcccccgggcagctctgccgccagcccagactcaggcctggtctcagctcgctggctgagcctggtggggcatccccaccctctggtctcggtgctgaaacagggacatgcggctcgttgctgcctacgttgggcccagtccttggctgcagtcctgacctcccgtgtgaccagtgtctctggacaccagtcagactcatgtgtgtcaggccgcggggctcagcctcagttgctctctgcttctgggtcccagcccctcgagaggtggcccggcccccactcttgcccagtgggtggctttgaggcttttagctttgcctttcttgggtggcagtaaagtgtaacgttggtgacattcactactcaaaacacctcaaagtgtaaaagagaagctgggaaggtagagggtccgggggctgcccacctgcccgtgcccacccacccactgcccctgtgccggggtgtccttccttctggatctcatgtccttgttggcgcctcacatgtgtctccccatgggcctaggaggtcactgtgctgcctcacatgtgtctccccatgggcctaggagctagtacactgctggaccatcattttgtttgttaaccatcatgtgacctcacgtgtcttgtgtccccaactccagaggggccacgtcctagcatttgtctctcccattgttttattttctcacccacgctgctttggcttgcacatgactgactttccgaaagggtgtccgatgcctgggtttgtttcttgacctcctggtcaccaccacgtatggctctcacggagcttgtggagccttctgcggccagcaccagacaccaagggtggctaccaggtatatggctccagatcccgggctggagatgcggagccgagtttctatgactttgtggtttactgtcttccagaaggacttgtgtacagcattccagaacagagggagtgggtacggggggcagacagccagggctttgagaacacggagatggagaccccgctgggggtgctgtggacagtggtgcagaggagtggcgatgcccgggtcctgggtcctgggtcccgcgtcctgcgtcccggccgatgtgagtcctcagacctcctaatagcattcgccctgatttagaaccagattcctccaggcaaggccaggggcctgcagtgggtgcacctgagggacctgtgcaggccacccctccctcccgaaggctcccctggcagcctcctcaacagtgctgtcttcagcccccgcccagacataccccagggcacctgctccgtgctcggagagcttagcttgctgcaagagtccttgttgcactgagctaagtctccccacccccttaacatttctgactctgccctctgaagccccgtggctgttctgccttgcacagacccacgagattccaggagtcgctcttcctgcttgctttgtcttgacctcttcagcttcttccagcaatccctgtgcgctgggccgcagaccctccgcaccctgcccctggcttagggagagctgatggctgcagagggctggccacacacagccccagtcctggggacgtgctctgaagatggtagaagggagggacacgtacaatgacctggcctccagggctctagagggtgagaggtggtcagcccttgcggggtcccggggaggttgacagagtcagaggacagagagctggtgtgggggcctttgtgtcagcaggaggtggtgctggcatgggggagggaggggagggagggaatgccaggggcttgtgggcagggcccgtgcaggtcatggagccggtagcatctcagagctggacagaggaggtaggctgggagcaggcccggttggggaccagtggcccctgcacaggagccagagggcctgggcagctgtctgtccagaaagcatgcaagaccccgtgccacccgggcacacagggctgtcgtgtctagaaagagatctcctggggtcacgggcaggcaaagctgattgattttggccgtgaagtttgaccttgtgatggaaaccgagctcccagggagtgagacaaactgcctccccgtgtcagtggccaataaacctgacttggttttacagccccgagaaattgctcactaatagccagacagatgctccccctgcctcgagctttagtgaacaaacatttccaaaccaaatagctgcttttgcctttttttttttttttccctccagagccaaggccaaatgtcagggatgccccagcatggccccgagcagggactatgaggagggggccgtgcattcttcgctctttgggggcctgggcggaggaccctgctgagacgcccctctgggaggcccgaaggctccctgagtctcttgtcctgtggtgactgtgggtctctgccgtgcatctgcttcagtccgccagttccatggcccgcccaccagtgccgtcgcaaccccgtcctttggactgggcttttcaggacatccggagagccttggtgtgagaagcaggccccgaggctaccttctggtcccccgtcctggggttggtcccctaagcgaacgcaagcgtgctttcagccctgtgtggacggagcgtggcgcctccagcctcactcagttctgtgtgtcctaagccgtgtcctggcactttctcttggaaactgaggtttttcttccgcctgtgtccttgggggtggccgggaggcaggtctgccagcatcaggtcttctggtccccgaggccgtcgctgggttgttccgagtggcgggaggtgcagctcgctgttgggcactggcggtggcggagcccagaagtctccgtggctgcccggcctcttgtccaagagtcctttgtgatttctgtgggggctgctcctctgaacgctgggcctgcgtcccgcagtctgtgctttctgataacgccagagccacgttccagtgtattaaacttttaacattcgccagattcaattaatcttatctttacaactcccaattacaggcagtaattaagtggagcagcattgtaggctggggatacggcattaatcatcgcagccttggagccataaattagttccttcccgtccccagcatcttcccagaaggagcagagtgtttcattccctgtgcggaggggtctttaatcccacaaaggtgctttggattgggattaaaatttctcatctttatgtaaatcataaaagcccatttaaaaaagaggaatgcacccctgtctagacagtggaagactctctgaggacgacagagttgaaggtgctggggtcgccttggctggggaccctgggagcatgcccagaaattaattatttgtgtcctgttagattagaggctccgtgatgttcgcctcttctctggctcctgccccctccttatttatttttatttttatttttattttttttaattttttgagacagagtcttgctctgttgcccaggctggagtgccgtggcgcaatcttggttcattgcaacctccacttcctggattcaagcaattctcctgcctcagccacctgagtagctgggattacaggcgcctgccaccacgcctggctaatttttgtat[147 bp omitted]agacagagtctcactctctcgcccaggctggagtgcagtggcaccatcttggctcactgcagcctttgcctcccaggttcaaatgattcttttgcgtcagcctcccgagtagctgggattacagcctcctgagtagctggtattttgtatttttggtagaggaggggtttcaccatgttggctaggctggtcttgaactcctgacctcaggtgatctgcccgcctcagcctcccaaagtgctgggatgacaggcatgagccaccgcgcctggcttctttatttcattaaaaaacaaagtggcctttcagctggaaggggctgtagtggagcaggggccgtctcccaccctctgagcttttccttgtcttgcttctgccctgggagggtctcggggagagaccatatcatgtgtcctctcatctgtgtgactgttctagaacgggagctgttggccttgttactctagagttggggtcgaggatgggacttgaccatcctcagctggcactcagctgtgtgccctcaagtccctgaggccctgtcctcgtccccttcgcttggaaattgaggtttttgttttgccggaggccttgggagtgggctgggtggtgtccccgttggcactggggcttctcgctccccctcaaggctgcggctcctggtgcccaccctccctgatgggaagagagtcccaacatcgcaggtctccagcttctggtacggcatgagcgggatgccacccccacttcgcttcgtgtgtttgcacactttcatcttatgtctttcttattcatgatggagccttggtgatctttcaaatgtaaaatgtgtaaaaataaaacttacaaagtcggtgacaaatgcagcttttctcatttccaaagctgctttttccctgttggctcccagtgccgggaaagggtgacgtgggcctggagaccgtgacgtgggcctggagagcgggctggcagctccgggggccccagatgcttgctgttccagactcggccctcccagggtcccctcgccacccgcagttccaatccaatacttttgttttttgccttttcagcctcctcgaggtggagtgccgcttaaccgggagcatccccactcctggctttctgagtgtgtcacaagccaccgagccatggtcctcactccccgctcctccacctgccccacctcgcttccttacggattccgtcctgaaagcccccacccccggccatcccctccacacagtcctgaccatgactccactttgcttctgccctgggcactgtctgcgtctccccaaggctggtcccaccagggacacccccttgcgtggctgccaccgatcttgcctctgacgtgcctcccttctctcgcaggtacgccatcccaccagagcacggcaagcgcctggagcggctggccatcggtaggtgcctgccctgagggccccagggacctgggaccaggtgggaggggcctgtgggtggggaagggcagctggcgtcccccgggctctgctgcggtctgggtttgggttttggggagtggtgacattctttgagccattactgtgtgattttttccatttcctcccaccctcgtggtcagattcacgcccttctgccgcgcagtttgtctcttgtgaaattcgcacagaatgcccagacgctcctgttttccagttttcttagcgcaaacttcttgggcctggtcaaaggctgccagggcccagggagggcagcctgtgttcattttcctcccatcacctgaccccacactgtgcccttgctaattctgagaaagcctaggaaaggagacaattcagccagcagtccgcttacctgcgggggagcagacatggtggccgcacggcgtttgcccttgttctgctgggacccaacctggacacctttggcaaatgtcctcactggtgatgccaccagctcgcgttcatgtgctccctggggactcttgggaaagaaggggtttgtcatagagggtcccagcatgtgcctgagggagtgccagatcctcaggttgtgggatacttggaaacaagtcagacagctggagacacccgggatggggccaccctgagctcccctgaccacccagccctgaggcacttgggcagggtccccatgtcagcgccggcatcacagcacaacaggggtgcaagtttcatgacacctcactgctcctaagtgcctggagagtcatgaaaagacacagctggctaaagcagttcctccctcccgctggtccattcccagctgctcaagagctggctcctccgcattggcaggtggacagcttggggtgcgtgaggggtgagggtcagtgagggcccgttgttcctctgacagcattgagagggccctgtccgagcaccccgcccttcaaggacggcgtcaggcagctcagcaagcgacagccacagcttttccaggagctctcacccagcctcagtacaggctcccgggactgcctggttgctgtcctctgtcccttccaaaccttcgagccaaaggacgcccgccacatgctctcttcccccttcccatgggcttttggctttggagatgggaactgtcagtctttctagggaaataagggtctcctgtcccagagactgcgccaggagtcacgtggctgtgcaggaaatgttgcccaagcgcggcagattcggtggtggggacggaggggaagggagtccttggggagtgggctgggccctctcctggcatgtgctctcctggcttctggactgagggctttgctcttggtatttttgagcgtttctattggaaacctggacccctttcttaggcacaggtgaatcctggtcttaggagcacgcttctggtagtagaaattctgcagtcacagacaggccgtagcaaaggtccagctcacttacatactaaagctgtgaaagaaaagctagattaaagcatttctcccattgtatgtttttaataccaatttccaaaacaaatttgaagacataagctaaagaaacattccccatgttgtattagcatcctgaggctcctgtaacaaatgaccacagaattaatggctgaaaacaacacacgtttattctctcaccgttctggaggtcaggagtctaaaatgcatgttaaggggctaaaacccaggtgcaggcagggccagttccatctggaggcaccaggggagaacccacttcccgccttttccagtgtctagaggccgcccgcattccttggctcggtcccaggggagaacccgtttctgccttcccttctccagcatctagaggccacctgcatcccttgacttgggccgcatcactccagcctctgtctctggtctcctcactttcctctgctgtaaccaacagtccctctgcctcgctgttctgaggacccatggaatgacatcggatcacccggatagccagggtgctcccccacctcaagatccttaactcgatcccatctgcaaagtccctttcagcatggaaggtaccacactcacaggtcccaggggttagcatgtgggtgccttggagttccatttttcagccagccacacttagaaagccactgaagaaaacctcactgagcggtcagggagcacctgtgggctccttgtctgctgcaggcatgacaccccacacctctgtcgtccacacggcagtacctctctactgccacagggcaggggatgcaggcgcagcctggggagagccagcagccccggtggggagcaggctctaggctccgcagtctgtactggagctgggcttcacccaggcgggcccctcctggtgctctctggtgcccagatcgagagggccaccccatccttgccagccacttctccccctccatatttaactgagactacagttagccactgtcccctcccttctcacccagtgtgacttttgcattagaaaagcagaggttgacaggagcctgctggagaggccacaggcaggatctggtgaggccacccctgtccccaagcactgccacatcccctctccctggaatgtgaccagttctaccctgaggccaggccaggcacctggagggctggtttggtttctaagtgtgcagagggctcagtgcctgggctgggtgagggggagccagggaagaattagttcttggtggtgctttcacaggggttcttagaaagtatggactctggccaggtgcagtagctcacacctggaatcccagtgctttgagaggctgacgtcagaggattgcttgagcccaggagttcaagaccagcctcaggaacatagtgagactctgtctctgtaaaaattagctgggcgtggtgttgtacatctgtagtctcagctactcaggaggctgaggcgggaggatagcgtgagcctgggaagtcaaggctgcagtgagctgtgatggagccactgcacttcagcctgggtgacagagtgagaccctagtcacccttcagcagggcagagcagcttctaaaattctgggagccagcctggctgtgaaccccgaggagggtcaggaaggttgtgggatgtgtcagatgcctgcagctgcgtggaaacaccttgagtcccctgtggcctctggctcagggccctgccctcccctctggaaggcagctgggggcaggatggggcactaatggggaaagcctacccgaccccccttgtgttcctaggtgcccctcccagactctttttggggcaggcgatgtgttccatcgttgggacggtggaaggggtgtgcgagtaatatggaaaatgaatagctgtgctccaaatgggctcaccgggagagttgtggagcctatggagagagcattaatgtgctggcgccttattggtgctaatcacttaaaatgtgcgcctttgttagagctttaatgagagccacttaaactgtgcattaaaaagaggaactgcggagaggccgccggcaggccgggcggcaggcagtcatcattctcgttgaaatgcttttagtgtggagaaaagttgctggattcggcaaacccctgtactttgcaaaacctcaccgtggtgtctgcgtggctgggtgtcagcagaagcaccgtggccccgctctcccgcctccccgtgcgcctgggcctccgtgtgctggtgctctcgcacacagctgtgccgccttccaccaatgacccaatgggtgtgtgtcccgtcctggaggcgcttgaggtctgtgcaggcttctagaagggccctcgggctggccgaggctgttggtcagtcctggcaggaggtggacgcctgtgggcttcctgtctgctgcaggcgtgacaccccacacctctgtcgtccacatggcagtacctctctaccgtcacagggcaggggacgcaggcgcagccgggagagagccggcagccctgttggggagcaggtcctagtctccgcagtctgtgctggagccgggcttcacccgggagtgcccctcctggtccacatctgacccccgtcctcctgcctcctgggccggcctcctgcccgttgccacttgcagagtgggtggtggagcaggaagtgcccgagatgaggcggtaagtcccctccctgaactgctcttcctggcttgggcccgtctggctcccctggtgttggttccgggggcccggctgcttcagggaagtccctttggcacagggattgtgttgcacactgaggggcgtgggcctcagcagctgctgccgggaagccggggcatccttaccttacccgccaaatgcacgggtcttcaccttgtgatttggaaacattcctgaactgtgctaattaggaagcttggtttattttttatttttatttttatttttgtagagatggggtcttgtgatgttggccaggctggtctccaactcttggcctcaagagatccatctacctgcctcggcctcccaaagtgctgagattccctgtgtgagccaccgcgcccagcctggctgtgaggtttgtgaaggcgccaagctgctggtgtgagtgcctgtttcccaggcgctgctttaagtcagctgcagagcgcactcctagacagacagccccacacacatgtacgcagcccaccatgctgagcacggcccaacaggaagaggttgtgagctctgaccacagctcggggtcaggcccactctgccacttcctggtggtgctggggccgagggtgagtcagttggtggcccgggcctcgatttcctcacctgtgcagtgacagtgaggacacccgctgtgctgtgtgggggggcaggtgcacagtctcattcatggccttgaaagcaggtgcccaagggggaggcagcactgctaactcctcaccgtccctggctggtctggttctagaacatcagctccgagaggagagcggccacactgcgtcctttccccagggtcgtgctctctcgttgactgagtgacgagagcggccacactgcgtcctttccccagggtcgtgctctctcgttgaccgagtgacgagagcggccacactgcatcctttccccagggtcgtgctctctcgttgaccgagtgacgagagcggccacactgcgtcctttccccagggtcgtgctctctcgttgaccgagtgacgagagcggccacactgcatcctttccccagggtcgtgctctctcgttgactgagtgacgagagcggccacactgcatcctttccccagggtcgtgctctctcgttgactgagtgacgagagcggccacactgcatcctttccccagggtcgtgctctctcgttgactgagtgacgagagcggccacactgcgtcctttccccagggtcgtgctctctcgttgactgagtgacgagagcggccacactgcatcctttccccagggtcgtgctctctcgttgaccgagtgatgagagcggccacactgcgtcctttccccagggttgtgctctctcgttgaccgagtgacgagagcggccacactgcatcctttccccagggtcgtgctctctcgttgaatgagtgatgagagcggccacactgcgtcctttccccagggttgtgctctctcgttgaccgagtgacgagggcggccaccctgtgtcctttccccagggtcgtgttgtctcgttgaccgagtgacgagagcggccacgctgcgtcctttccccagggtcatgttgtctcgttgaccgagtgacgagagcggccacaccgtgtcctctccccaggatcgtgctctctcattgaccgagcgactgtgtgggctgtggtctggtggattttgtctggggaggtcggaggagaagtctctgcatagccgtgccctgtgagggacccaagtgtatgccatgggtgggcaccttgtcacacaagtaaccctggtccttcccctggtgaggaggcccttggctgcccctgctgctgggcagagacgagaccaggcatctgctcacatggtcactgcgcagaggccagagggtgtcaccactgtctgccacctgcagagctcacagcagggcactatggggcggctcctgcgcatctccttccccccgacctgcaggcactggggccctgagaaccaagggcagatctgggccgtgctctgtgctcccacacgcccgctctccatgggaggaaagagccagcctgcccagagggcagcatcctcgctgaccccggccggctgtggcccaggagactgacgtctgtcttttcggccctaggcttcttccccgggagctcgcagggctgcgacgccttcctgcggcataagatgaccctcatctcgcccatcatcctgaagaagtacgggatccccttcagccgggtgcgtacgggtggggcctgcacgcctgtgggtgaagtgggtaccgggtccaagcccaggtggccgcacataccccaggagataagctgtttaaccctggagaagtttctagaacagtgattagcatgccagaggagggccgcatggctcagcagttagcctccagctcttccacggggaagcgaagatggcagagcttgaatctggcggggtgttaacctcccctcccaaaccaaaccaaaacttcctcctgggtgtggccatcagaggcccctccgcaggggctgcaggggtggaagggcaggggcaggccctgctgacctggcaggaagctgccaaagaaacagagggcagggcccctcgtcccgtgcaaggtgggaacctggttcctaccgccccaggccacaccctaagtctcaggcacccccacggcccatgtcacccggccgtggagagaactgcctgtttagaagtgacatttcgggctctcctgcaccgtgaagactgtgaactcattcagttcactgcttcaggggctgctggtggaggctgtgatggaggagacctgaggccggggggtggggcctccctacacctgatttgatggacagctggggtttggtgtcccaggagcagagcaggctgtgctcagggtccagctcagcaactgcacccactcgaggcagttccttccccatggagaagcctttgtccatgggagagtctaggcctgtgtccccagctctgtccaggtgagaggcacgtgccaagaacctgcaaggcaggtctgggccgcagcccagctcatgaggttccacgggaagagtgatgtgcaggctcgggagcgtgctctgtggtgaggccctgagtgtcagccagccggaaattgcttgtgacatttcaatcaaaccgccaaagcatcagctcacacatcggggatccgctcttcctggcggggctgcaacccagaggccgcctcccagccgctgcaggcattcatcagacagcacagatctcgctcggagaagtgcgcatttccggcctttcctcttctcccccgtcttctggttggaacatcattcagtaccagcaaaaccagacagatcacggcattgctcagggaagtgagaagtactgattttctggctggtttgtctaaaaccttctccaaagtggtgcttcctggaggggggtgcccatcgaaggggtgggcaggcagtgagtggcctggactcccaggtcagcatctgtatcgcactgcagtttatctgtaaagttcctgaacctgagccaaaggtggctcaccaccagcctcagagcggctgctggcaccatgcatggtagcaggcggggtccaggcagtacggctgcgctccccaacaccgccagctggttgctggggccgggcgccagtttctccagaggctgccacagtgaaggcccctgtcccactgcagcgaacagcaccctgtgccgcccggcctggggaccgtccttcagcctctcagacgccatgggcttgagatgaacgtcccttccagacagcagcgtgggtcccctcatctgaattcctggcagccttcaaacaagtgactccccacactccccttataaatctttgtaatggtatttacttctaggagaaaaagccgatcaatagcagagctttttaataattaaaagtgtgtacttctgtaatctgccattgactccctcatttattctgcaagagctcgcagaggaaaccgagttccgggctttctccgtgcctggtgtctggggccgcgtcctgtcaccactgatgactttgccgcaaagcctattcatcatcccaacgccttctaattgattgttggataatgttgacagcagtgacacaggggacagacaccgtgagtgtggaacgaagccaccaggatgcaggttttctcgcaggaacataatcttcttgtcctaaccgagcacattttctcttctaggccttggttcataggagggctgggggagtgaggtccttacactgtgagagcttggctctctgctgccatcacccccattcaatcttggcattccgggggcccagctggatccctgaaggctctgagtctgatgtctgcctgacgcatgcctgcaggcctggttctccaggggagagacagggagccgtcacttggccttagagcaggtggtcagggaaaagcctttccgaagccggctcaaataggataaaggaatcagtaatggcatttactttactttcttaacttttctttttttctagagatggggtctcactctgttgtccaggctggtctcaagctcctgggcataagtgtttctcttgtcttggcctcccaaaatgctgggattacaggtgtgagcaccatgcccggcccagtaattaggtttttttttaaaaagccccaaaccttaattttatttgcccctcatttcacggagctcccagcgtagtggggagaagctggcccagagaaccccacgtcctgcacagtgagggccagcccttggggaccccatgtcctgcacggcgggggccaggccctggggccacgtgtgttccccccccacccctattttctgccgcgtgctcgttctgctgcacgtggctgtcacttgaatgggaatttaaaaatataacttaatgcacactgacttcccttgattggtgcaattaattatttgaaaagaaaaatatcacagtgttcttaaggactggcatttttccaagctgtgtcagttttgattgatgtctgacgccgtggctggcttctgaaagcctcaccagttctgatggcttattggcgacttcagtgtatccagcaatctctgctcatctttctgggggaatatataatgatcagcaggcctgagaactcctacaaatcagagataagaaaacaaatggcccgatgaattcggcgtgaggggcttgagcagacgcgttacgaaggagctgcaggaacgaaagccatggttcagtgcccagcatcggtagaagtcagaggcagccagctgggagacaccgccagccccaggacggccacgtcagaacaccgccaccagatgccagtgaggagggcgcagctgcacgctgctcccagccggggtggatgcagggcggtgccatggccatggaaaaccgttcggcattttcttggaaacggaagcatgtaccctgtgccccagcgatgccactctgtgcatatttactcaggagaaatgaaaacatatgtctccagaaagattggtacataagtgttcttagcagttttcttcacgagagccccaaactggaaacagcccgcacgtccatcaacaggaggatagataaataaataaccatagatccacgcgcaaccgagtactgtttagaaatgaaaaggagcggtcgcctggtgcacaggacagtgggaacaaatctcagaaacgcacgccaggtggaagacaacaggcacgtgtccctgccgtacaacgccattcatgtgaaccactaggagggaacgaggtctgtggtgactgagagcgcgtgcgtggttcggtggggatggcctggtagagggctggtaggaggggtgcctgggggcccggcatgttttgttcctgtctggatcagtggttacgcccagaactccgagcagcctgtgatccctgcgttttactggatgttaaataaagatgaggagcccacttgacttcaaggattctagttcatgagcctcagtttccacgtctgtggattgggcccacagccccacctcctagaagcccttggcctgagccccggggtgcagcaggtgggagccatcactccaaatttgttgttgatctttctggatggtcgtctttcaaaggctttatcaacgggcttagcagtgagcagggagtgggggtcagtgtggccatctcgagtgtccccagagtggggagggttcctagggcacaaggctgtagccccccagccctggtaggcagccctgccttttcttccagaccttggggtggctgttgggaaaccttgggtctggggtcattgtgggccccaccccagccacgcacgcctcggctcctcagtttagggggtcctgcttcagagacctgcaaagtcgaatgggccgaacatccgaattggacctgggtctggaagcattggcccgctctccagggtgctgatctgtggtgtcaggtcatgcccccggtgtgcagatatttctggatctccatgacttcatggagatccccttgttgagatacaattgaaagatggcttgggatggcggcgtgtcgcaggccccttcctggcgtgttttgcgcgtgcagtggtggttcctttctcatgcgagggcagaaggtgtcctgagcgcgtgcagtgtcttgtcttcagagcactctaaagctgctgtcagcaccacccgccccgaaaccagccccagctgcttcaggacatgtcacagtgactgtgagtgtgactcagccacctccaaagcaggaggcccccatcgctccccatgaaggtccggctggagacacccccacgggcattgtgtccagccacggctccatctgcggttctcccactggggtgatgctgacggccgccttggggcagggcaggggctgctggggctggaggggcccggctgagccgagtggaggttgcagagctgtggctgcggctgctcactatgtccttcatgagccgcgtgggaaatgggctggagccctggagcccctggagccgctggatcacctttgactttgtgaaacccccttggctcataagccaggctccctggcacttgctgggaagtgcccacgtcccatcccctggtgcgcctctggtggccctgccctcacctgtctcctttccctctgcagatcacgcaggaggccggggaattcatgatcacatttccctacggctaccacgccggcttcaatcacgggttcaactgcgcagaatctaccaacttcgccaccctgcggtggattgactacggcaaagtggccactcaggtaaaagcttgcctgctgggaacgggtcccagcagggcgggaggaggctcttttttgcctctgcagccacacgcccatagctggtccagcagccgtttcgctcagcccagggcctgggctctcaaccagggtctgattctgggctcctcagagagcttttgcccagaacgctccttacctcgaagactggagaggaggtgggcaggtcgggtggacgatggtggcccagggcccatctccagcgagttccatacaccagttatccctcggcctgcgtgggcctcctgggcatggccggctgctcgggtctaggggttggggtgtttcctccaccagcaccattgtcccccctgctggctggctcctgggcatctcctggccatcatggtcctggggttgggttgtttgctgacatctctctcctgggggccgcttggccaggcaggagcccactcaggcatctgcccccctccctccctgctcccctgtcagtggcagtcccccagctcccagtgcctgggtgcttcctgctggtggggtccctggaggtcacggtgagcttagcatgcccgtgggaagactcacagtgagtggcccttgcttgatttttttctggtgattctcgttcctggtctcagaaggccgattattggccagcaattggcgtctgaactgagcgcttgttccccactctcctaacgccacgtacagccatctgtgtggctgttctcgaccatgcggagggtgtgggaggctactggatggataggaagcccacaagagctgctgctgggcacgggtgggacggggtcgccttggctggccaccccctcccccatggtctctgccttggggtcccagtgacggggacgtggacggggcttatgaatcctaagcctcagaaaggggagtgtgggacccgggaagggaagcagctaggaggccgtctgggcatcacaggtctagccctttcctggctgcctgtctggagctgggggctggggagcctcctcccagggctgtccctgaagtcccctgcgtgcttttcctggctgcccccaagtaggactgagctgtcccggcaggccaggctcggccacgtggccctggctcagggctgctgtttctgggcagcattgaacagcccagctcctcccagcccctctgtcttccccgcagagacagcctcagcctcagcccctcccggcgtctccctctggtttggggtcatgtggctgctcgtgatgcagcaggacgggcagcgggctggccagggtgagagcaggtacttcctcccatcgtccctcccagtgcagagccttccagttcctccagagccggggtcagcacaaatggcagattcttctcagatccagatgtgggggaggtgtgataggagagaccacagggccagatccggattctttgactctcgcagcattttctagatgtcagaccttggcctggtgcggtggcttatgcctgtaatcctagcactttgggaggcagaggtgggcggatcatttgaggtcaggagtttgagaccagcctggccaacatggtgaaaccctgtctctactaaaaacacaaaaattatccaggcatggtggtgggcacctataatcccagctacttgggagactgaggcaggagaatcacttgaacccgggaggtggaggttgcagtgagctgagattgtgccctggtactccagcctgggcaacaagagcgaaactgtctcaaaaaaaaatacgtatttatatattatatatgtaatttatatgttatatataatttatatattatgtataatttatatattgtatataatttatatattgtatgtaatttatatattgtatataatttatatattgtatatttatataaaataaattatataaattacataatttatatatataaatataaattatatatgttataataatttatatattatatataaatataaattatatatgttataatttatatattatatataaatataaattatatatgttatttatatattatatataatatataaattatataaattatatgtattatatataaatataaattatataaattatatatataacataatttatatatataaattatatatgtatgtataattaagatggattttggccggacatgatggcttcacgcctataatctcagccctttgggaggctgaggcgggaggatctcttgagcccaggaggtcaaggcatccctgagctatgattgcaccactgcactcgagcctgggcaacagagtgaggacccgtctcaaagaaaaaaaatgaatttcacctgtttcattttacccaccctcccccgcccgccgccccggcccacccttttatagagacagggtcttaatatgttggccaggctggtctggaactcctgggctcaagtgatccacccacctcggcctcgaaaagtgctgggattacaggcgcgagccaccacagcacaccacctctttttgcttttttctcctggctactgggaaaatggaggcagcataggtggcctgtgtgacatctctcctggccacgccggtctggacgaatgagctaacctttatttttctggctgtttctctgccttcaatccagtttagaaaaagaacaggggtctacagcagggaaggcttgagagatgcccccaggactcagttcagaaagtctcgaatgtctctagtgaagactctgggcttagctaaaggaagagagatccagaagttgggatttcagctttttgatctaaaggagtagttaagtatctcagggctgttgctgtgttgaaagggcatgtgtctgtgtgtttgtgctgccgtgaggacaccacgggtgttgtgaccagcccagcagcagattgagctgtaagccccaggcctcgggcttgtcctggaggtgctgtcggagctgaaactgcagcggggcggtggggactgcccagatattaaaagcaatttggggttcagccatgtgttcacaaacaagttggcatttgggaagtgcagacttagattgggctccacgcttccattgtcaggcggcgtagcaagtggcgtgcagcgctcgaaacacaccaggggttccaggcaggcgcccagggcctgggcttcctcctggaccccccagccccgctgtcccagcccctgctcaggcacccctggtgtagtcaggcctggcctgggcggcgagggccttacgcagggagtgtcattagccacaaggcctctgtggccgtcgggggggtcggtggctctcaggcttcttggcggggcagccggcccctgactctggcagggttttctctcccataagcagcccaggctggagagtctgttagagcatctcgccgcacagatgacagaggagtgttagaaggcagggaaacggcccaggtcaggtggggctcgggccttgttcagatcttgtgtgcagccagattggagagaaggggcagcccagaaccccccttttctggtgtccctctggccggcccagctcccctgtcccatttgcgtttcgggccactttgttttgagcacattcttcagaagagagccaaagaggaggctttccaccccctcgatttgcttagagacatttttgcttgttggctgttcaccttccttgaccgctagggacccctgcccccccccaccccgttgtcccctttctgtcatttttgtgctcaggagctgacaggtgaaaagccaccctcctgccctggccgggccctgtgaattttgggtgtctgtgttcacgggttggcaagctagggctcggatctggtaggccgacgctgtgccgtctgcaaactgagcagggggtttacgtcttcacagggttgtgggaggagggcaattaaaaggatgtgtgacctgtgacagccggacgaaactgaaatctcacccacaaatgagcagcctgtgcacagagccacactctggcatggaggtggcgtctgcgtctgcttcgccccgcggagttgagtagttccgaaaagccaagaggcgtgtgctgcctggcccttgcaggggaagcctgtctccccgtctacagatgccagcggggttgcacagctcgcaggacagccacctcctcccccccccagcccccagggcctctgtgggcagaggggctgctccgaaagcaggttggcccccaccgcctcaccacacctcgagccagtgcagctccctctggagttccggatgggcctgcagcagctacagccgtgagcaggccagaccactgccacagatgtgctgccacctgcctgcggagcatccctggctgccccatggcaggcaggaggcccagccctcagcccaggtctgcccccacagggcagagctctccaaggttcccccggctgtaaaatcccagagaaatacgatctccctgcagcaggtggcttacctacttacacagccttggaccagagcctccgggtggagcttccagggccctgcgcgcacacacaggaggcagcctggggctctcccctcccgtcttctgcagagcagggctggcgcctgcctgagctcacaggtgggatggagcagcccaggccggcacttgtggcctaaacacggcctcattcactccccatcagcagaatgccgtgggcacacggaggccattgtcaaggagggggtgggatttattcccgtgggtgtctttcctttctagctggtctgtgggcattcacccttgccacctgtctgtgcagccagtgacatagtcattgcccctcggggcaggaggaggcctggtggccctgtgtgtctgtgtgggggaggtacggctgtgtccccacccccggctctccactcctgctcatcccctatgaaacctggtgtcatggacctgctcccctcggggctggtgacctttggaccccagtggtgacaaccacagaggtccccagacatcacctgcagcgtcccttggaggcaggattggccccagtgagagctgctgcccagggccacttccgaggtcagtcatctctttctggggggtggggtaggtagtgccagtgtcatttttgactcccctgctggtgtggccttctaggcccaggtttcccagcatctcccctctcctgctgagggcccccatctctgagtattccatttgagctgctcatctctgtgccactttttcccaacttaaggcggctgagctctgcagcggtctgcagcctcggtgtgcgacgtttcttaagcacacaggtgttaagtatctcagagccatgaaactctctgccttgcctgacagactcccaccttgaggatggaccctggctttggggctgggatttcattcactgcactcgagtctctggacgggggctgggctgttcggagggtttggggagtgagggcaccgggcagcacaggtttaagtctcctgtgtaggaatctcacgtctttcgggagctaaatgccaggcaggaggttgctttcccctcagaaactagaagttcttatccaacctgctcttcacgcccacctgtggggagagaagcccattccttgtgttcactgcctgccggagagcaggagggagcctgtttcctcgtgggcgggatgtgccccccgactcgggtaggcccgagcatctgagggcccccaagggcccatcgttttcagggtgaccgtccacacctgcaggggcagggagtcggcggcttagcttcctctggagcacggttccatcagccagatgcgctcacatccagctcttagcggctcctgcaaaaactcgctctgatcaaagggaggtgagtgtaaaaatgcggcccgggctttgtctccaactccccccgtgattcctggaccacgcaggccatatcactcggacaccacggatacaaaccctcactcccctggcccctagagctgagcagagcgctgggttcgacttccatctagagcagaggtcgatgggggggaggttgcccctgcccacagctccacccgtgataagtaggcaggcttttccataattaatcaaaacctaggccgttcatctgtgggccagggctgagcagagaccaccggagtccctgagggggcccctgaggctgcaggggacaggccaggccccccccctccccccccccgcaaaagagcaggttgtggttataggggcaggatgacagtgggagattttgacatcctcaagaggcagaggagcaggacgcccctgccagcttcatccgcacatcccttggggcagatacagaaggaagaatgtgcattgttggaaactggggaatacggtaaacaaagagaagtgggagctgaccttaccatctctgccatccgctcagccatgagaaggagcaaggcccagcgtgggtgaaccctgaggacaccccgctcagtgagagaagccagacccagaggctacaccgtgcgagaccccatttctatgaaatgtccgggacaagccagtgctcagaggcaggaagggatgcttgggtgtgggggctggagggtgacaacggatggggacgggttttctttggaggatgaaaatgctctacctttgatggcgaagatggtctccccactctgtgaatacacaagctcctgcgtcgcacacctggtgaattgtagggcacacgaatctcactgaaactgtccagaaacatccttcccccagatcagctctcagcaaatcaggaacagtaatccagaataaaaactgggcagcctttctggaaggccgtctgccatgggttacacatgtgtctcctgtggcctagcggttctgtctctggaacacgtgcataccggttccatgtctagggatatctgtagccccgtttgttgtagtggaaagttctatgaccaggggatgggttgaaccagtggaatgttatgcagctgtgaaaatgggtttgctccatgaggtttgctctgtatctttgggcatggagagatgagcgcgacaactttaagggaaaaaataggctgtggactgggactcttgtgattcccgttttttgtggggatgtggttcttgaactgggaaagggagatttgcccaagtattggttgatattagtttgatgtcatggaatttgggataccttaaaaatatgcactaacttctcaatatggttctgtctttttttgtactaaaaaaaaaaaaacccacatactcctctttccatagtcagaggggtgtagctctggggagggaagagtggggtccgccattcctaggtgcttcttgagcaagcaccccacagttcccaagtggaaaaggtttttgttgttgttgcttcgttggtttgttttcagaatgggagttaaaaaccaaacaaaaggccaagcgcagtgactcatgcctctaatcccagcatttagggaggccgaggtagggttgcatgattccagaggttcaagaccggcctgggcaacatagtgagaccccattctccacaaaaagggggaaacaagacaaaaacacaaaaactgtgaagacccccaaagcctggcccccttcctccctgctgagcaggtgaggcagtgctggaaagaggacagagtggaaggtcctggaagcccagcccagcattgctgagcgcctgccgtgtgcaggggaggggtcctagcccctgggtctgccagggagaggtgagagtgcagaggacagcaggcttgcctccctagccacacacctcgctgcatgccctggcctcgccaggctgaggcttagggtgcagtacccggttcgttttgagaagtctctttctcagctagagctgtctcagtggtaacgttctctctctctctctcctcatctctctctccccccatatctctccccctctctctctctctccccctctccccctctgtctctctctcccccatctctcttccccctctctctccgcctctttctctccccccctctctttctctccccctctcgccccctctctctccctctccccctctttccccgctccccctctctctctccccttctctttcccccttgctctctccccctctcccccctccctctctttctctctctctctctgtctccccgctgcgcgcgtgcgcccccctccggcccccccttccccccaccgccgacagtaccaccctccatcaagtgccgactctgggccttgtcaccttgggaggaccagagtagtgcagtgactttgccaaggtcacacagcaggaggctgggcccagcacaccctagaccttcctctgcttcccttgccccacttggaggcacaggccgatggggcatctgggagcccacaccctccctgcccaccaggtgtctcctgggccagtggcttcgtgtcctgggcacgtgtcctgtgcacagcccggtgggggcagctggaggggtctccaaggcggcggcttcctgtctcagagcaggatcccccggcatgtgctccagcaggcaggctttgtagtgggattactaatggggcagatcaaaaggatgttcctatttcactcaaggaaataaaatgtgcacgcagccgcctttctcacgctgaactcaagttagtcctacaagcctgcacgccatgttagattagctcagcacgcggccgggctggccccgaggtgggtggtgcctggtgctggtagataagggtctctcctccagagcccaggactcagcggcatcccgaaacaccctgccacggggagagttgactgaggattaaacagagcgcgagagatgtgaagcctggctggaaggctggggagccactcacgctctcttaactggttccctgccagctgtctgtgggtgaggcctgctgtgtgccagcctccccggggacatctcgggctctctggaggtgtctggcagggagagcttctgctgagcttgggaaggggacgatgacttggattccccagaggcgccattccaggaaacggcccactcggcaccacccatctcctcccacctccccgcatccaggctggatgggggctccggcaggaaccaggcctctcctaaaaccccagccctggggtgtactgaacttaattactgtaaaattcaaaccaaattgtttctgctgcctgggagaactgtgtgttccttctgtttggtaatgaggctgcctgctccaggtgattaacccggagcccagggggagggagcccagggggaggcggcagaaggcaggggctggggaagggtgggagggaggagggcccacggaggtgcgggaaactccagccactcctctgacccgctggagcccacggctggcctgtgccctgcctttggcttcctgcctcagtgagcctctgatttatggcgttgtggggctggacgcatcgtgtgtgccgcaaactgctgtgtgaaatatgtctcccttgctcttcccagatcttccctgtcactctgaccctggtgaggcctttggggccccttcccatgtgtgggcttagggggtgtcacagtcacgcagaagcgtggggagaatctgcagctaagaccaggcggagcggatcccgggccgggccagaatgagtgggtcccatgctggctcttggcctagtgtttatgctgcatgtctggagggtgatctaggagaggagtggtctggaaagaaggcctcgtttagtctctccctcggcactgcggacattggggccgtatccttctctgggctggggccgtcctgggcactgcacggtgctgagcagtgcccctggcctccacccactccatgccaggcacaccccaacccagctgtttcaaccacaacatcggcaggcacatccactcccatgggggcagggccacccattgaagacacctgggtctccaggctccctgcgggcccttccttcctttctcccactgctctcggctttcgggatcacgccctctaatacccccggttctgctgcccaggagctccgggggggacacatctccccagaggagggtcgggggcttttctagaccgaggctcgtggtgtggctcgagggcctttgccagctcggcagcccccagtcttctctaccatccttcatggacagagctggttcgggggctgcagctggttgctgcctggcatcagaggagcgggtctgcttacggggtcaggcagaggcaggaccccctcgaggggcactggcgagggagcccaggggtcagccgtcagagaagcaggagagtcagaggagggggctcgcagggcctggccctgagtcagaaatggtggagttctcccctctgccatctcagggcatcccggctcatggctgttcctcagccgtcgtggatgagtcgtaacctggagagtgagagagaacctccaggggcaactgctggcaaggagggatcaggggaggccgggcccctgtacccctgaccacatgtcctctccccacccaaggtgtgacccttcatggggcctgtggttcatacctggagctgtctgcctgggtgcagaccctcccctcctagtgctctgcctcagtttccctcctagggctgttggaagtgacatggaacagcacttgggtggtgcctggcacagaagcaggactgctgtggctgttgaggccccttcagggcagcatgtggaggagaaaggcaggtcctggtggcctggggtcaggtgtgcagctgcctgcttgtcatgtccctgcaggggctcacaacactgatagactcgaggctactttcatttagggagggccaaaggggacatcggagcctccccaggcacctggtggatgtgtgggcagcatggaaggctgcggaaggccatggaaggcccgtgaccttgcctggcctggctggccgggaggggcagggagccgctttctgtgctgccaggaatggccccgcagccgaagcccagggagccctgggagccggcgcctaattgttttgttgacgcggctgccgagcacttccagtaggtttcctaatgaactggtttgttatcggcctcactgcagcgctgataattacatcagaaacagggggcccactcgtccttcccacgcgttctgtgagccatcagcgcagatgcgggcgcctctgccccttcctcggtgtttaacgctttgtgtgccaaggcacctgccacccacacccaccccagacagatggtcgagatggctgtgagaggagtgtgaccgccactcgccccggttggtgtctgcttggcagtggtcaccgcgcaggtcactgttcagctgctgggaaggcagtggatgaggccatcgaggtccagggaggagacaggacacgaacaagggtggaaggaggaatttctgctcctagagagggtgcagggacgctgcagctgcggcctggtgtgtctgccacctgggtagcccagtccacagcccaggcagctgaaagcaccagacatgtatcctctctcagttctggaggcagaggctgagatgggtgtgtggcgggccgagccccctcagggcgccagggagaccaccctgcctctcctggcttcagggctggccgagatctcagggctgcttggcttgcaggggtgtcgccctctcctctgccccatggtcacgcggcccctcctccctgtctttgtgtcctcttgtctgcttctaagggcaccaggtgctgacccccggcaggccctgatcccatatgtgaatcatgcactgatgacagctgctaccaccctgcttcagaaaagctcctctgtgaggccccgggtgcaggatgctgagtagcgcggggaacagcactgctggggaggaacgaaaattgcgaggtccctgagcgggggacctggcagaggccaaacgtcagaggtcgggggctgcagtaagggcctttgaagttagatttcatcaccatgtgcgggggggaggcactgggcatttcagcaagggagaggggccactggctggagaagggactatgggagagatggggcagggagcccggcgtggatggccgccgtctagacgggcatggggtctgtgggcgtgggaagaaggggacagcgtgtgcctgtgttttaggggtggtgcctgtaggacctggtgataggacagaggtgggggcacaggggaggggtggggacttgggcatgtaggtgtgcggtggtgctgggagcgcacagagggacatggaggagccaggactgggtgtgctgttgagatgcgtcagagcctgccttccagtgtgggagccacgggccacacgtagcaccgtatccattaaccaaaatgaaataggatgaaccctccactcctcagtcaggccagccgcgggtcaagccctttgctaatagccgggtgggctggtggccgtgtcctgggcagcgcaggtgcaggtcatcgccgtcaccacagacagtcctgtcaccgtgcagctgatgcgtcctgtggaggggtctgcagctcgggggcggcgccgggggcggggcaggggcagtgtgagggatgggacgtgttgagccatagatgtcctgtcggcagctatgagatgctgtgccctccccacgccaggatcgctgtttctaaggcccctgcccgtccccatccctgtccacagcagggcaagcaccagccatgcaatgtctgtcaccgtcggctgtagaaccgcccgctggtggctggcattgtcctcaatgttccgccctggttcctggatcagggggctgggagttggcgctgcagctgacgagagcattcatgatccccgtggtcagatgctatttgggttgatgattttatcggaccacatataatcattttctcattaggccggtggctgtgtcttctctctgccactctactgttttacatgagcagactctagtatctgttcaggcttttaaaaaagagatggcctctggtgaaagctcagtgctgtttaaatcaggaaaggtggcagatgagccccctgggctccaaggcagcagtggtagcccactgtgtctgcaggtggccagggtcctgtgatgatgctgccagccaggctgctgcacactgagagctgggggcccacgagcctcggtgctggacgcccccacagtgtggatcagatcgcaaggggctggccagggcagggcagagcctgctaggaggagggagagggctgggagcagccagggtggacccctcaacctggatcagatcacaaggggctggccagggcagggcagagcctgctaggaggagggagagggcccggagcagccaggtcggactcctcaacctggggaccctcccccagcagctgcaggcttgagtgtgtgcagcacttatgtgcgagcatgtcgtttgtgtgtgtgtttccctgggaatcagaccctggcaggggcccccagtctatagagtgggtgctatggaccccagccgctgtgaggcagagtgtgcgccccaccaaggggcaggctgccgaaaagtcagcttcacagggagcttgttttaggaggaggtccttgtgttatggaaatgtaggccacagactgaggcgcacacagggccggtgtacagtgtggggaatctttttttttttttttttgaggtggagttttgcactgtcacccaggctggagtgcagtggtgtgatctcggctcactgcaacctctgcctcccgggctcaagcgagtctcctgcctcagcctccctgagtagctgggactacaggtgcgccaccacacctggctaatttttgtatttttagtagaggtggggtttctccatgttggccaggctggtctggaactcctgacctcaagtgatccacccgccttggcctcccagagtactgggattacaagcgtgagccaccgcgcctggccatggcgtggggaatattcacaaccctaccccatccggactcctggcagcatggagtggtgtcaccttggatggggagcacggtcccaggtctccacgggcttgggcaacccctggggttcctgctgacctcagtgcccctgcccagaccccagtttctcacttccgtgcgatgtggcatttctacactggagtcgctggtgacatcagtggcgcctgttgccgcggtgcccccggcggtgtcggtggtgcgtgttgccatggcgcctgcctggtggaggaagtgtcccgcggtgcccccggcggtgtcggtggcgcgtgttgccatggcgcctgcctggtggaggaagtgtcccgcggtgcccccggcggtgtcggtggcgcgtgttgccgtggcgcctgcctggtggaggaggtgtcccgcggtgcccccggcggtgtcggtggtgcgtgttgccgtggcgcctgcctggtggaggaagtgtccctccgtttctggatttgccttaatagctcagagaaggctgagggaaacctgtgagtgattgtaaacatcccatgctagggaagggcttgtgaggccacacagggtggcttccaccagaatcgacactttaaagagcacgggctggcagcatgtgtggtgtggagtcagcagggcggggagaaaagaacaaggcacgtgccccatggccatcgggtgatggggatggtgcctgttcacgaagaagagtcaccaagggaaggaggtgaatggtaaccaaagccaccaagatgtcaatctcaccgtacacaggattcttaaatatgtagtaaaaggctgtaaagccccacgtggcgcatcagtcggccatccaggcttcgtggttttgttttttgttttgtttcttgagacagtctccaaaaactccagattggagtgcagtggtgcgatcatagctcactgcagccttgacctcctgagatcaagcaatcctcctacctcagcctcccgggtagctgggactacaggtattgcaccaccatgcccagctaattttttgtagtttttgtagagttggggtctcactatgttgtccaggctggccttgaactcctgagctcaagggatcctcctgccttggcctcccaaagcactgagatgacaggcgtgagccgccgcgcctggcctgtgcaggccttggtggagctgctccttcggtcctgatggggagcatttcccaaatgtgccccatggaaaaggcaaggcgcagagcagggaccgtaggatgtcattgacatgaaaagcagaggaccgctgccctgtgtgtcgggaggctggggcctcagggcagagagcgcgttggccaccttcccttttgttcttctggagctgggtactgggtgcagtgttggctgttccagaaagtctatgagttctgtctccgttttggcttggagttctcctgtgggaggtgcccagcaaggatgattcccctcggccaccagtgagatgggaaccctcctcctcctcagctcagcagagccgtcgtggacctggggcccccagcttctttggatctcaggcatggggggcgcaaatgtcagtcgggagctgtcaagctctgtggaaggtttctgcatgtttgcccgagccccaccaggaggggcttcaaaagtgcttgtccaagtgcagagcaaggcagggcacagaggcagaggcagacacagcccccagctgggccagggctggtggccaaggggcttcctcagtgtgtagcctccgtggcagcctccatgtgtagtacatggtcagtagaagccccattaacagcaggggggactcggcctctggggagcggatttcttttgcaatatgatgttaaaggaaggtctggcattcagtatgttttttattttattttttattacagtttacaaaagcactccagtttcattggatttcaggcattttgcatgggatcgttatggctcagaaggcgtaatctcaggcattagattagagtgacaggcttgggaattcagaccggagaacagctgccctgcctgttcccttgtaggtgactggcaggtcttgctttataacaggaagtgctcccatggtggccctgacttgcccagcctgtggggtttgcttgtgttacctcatttaaaacccctggcagcacgaggttggtccatctagttccctagaaaggtgccatggactgaaggtctgtgtcccctcagagtcatctgttgagtgctcatacccctccctagggtgatggtattaagagatggggcctctgggaggcgacgagggcatgagggtgatgccctcattgatgggatcagtgcccttatgaaagagcccccagagagctccctcgccccctccatcatgggaggactcagtgagaagatgccaagaatcaggaagtcaccctcaccagacaccagacctgccagtgccctgatcttggacttcccagcctccagaaccataagaaataagcaatttgcttatgagcccccagcttatggtattttgtttcaataatggactaagacaaaaggttcattccagtcacttcctcacatgccatttccctcatccctgcctccaaggaatgtgcagggtggatttctgagcctttagttgctgctttctttccttttggcagagatactttcaggggaacctggtcacatagaacaacctccggttccagtagtgctgggcacacactgggtagcagtgggcagtggagaggattgcagggcaccagaaggcccatttgtttcctttctctttaaacatgatgagcaggtctgtgcaaataccccaaagtccaaggatgctgagaggccaaagaaagaagctggcattcagtttctcagagagaaacatttaataaggatttacaacgagaagccatgtctgtgtcttgggtggcggtagtgagacaagacggtggatccctgcaccatcacccccagacccagggcttatataccatagggaagggttgttttgggatgtgcaagacaattgaaatatggaaacctcaagggccatttgaccaaagggcaagatttacagtaagtacctgctcttatacaaggagcagtagatgaactggaaatctcagaggccttcccagaatgggggttaatcaaaagccaacatggcaggttagcatccaagatggagttgctttggcctccacacctgctgtgacctcatttctgagagacatatgctccaggggcttcttgagaaaggaacacaggcagtaaagttttgagacttttctcatttgaaaacagggcctgagggtggcaccctcatggaggagatcagagcccttataaaagagcccccagagagctccctcaccccttctaccagaggaggacacagtgagaaggcaccatctaagaaccaggaagtgaccctcaccagacaccaaatctgccagtgctttgatcttggactttccagcctccagaaccttgagaaataaggaaagggcagaatttgaaaatgaaaccaaaaactccacaggatggttaggcaacaaagtagaagaacttgtgcaggagaagctgctgtctgggtggcggatagtttggctgggtatcgaagtcccttcgaaggctgcacccatccgtggttctcattcagtgctgctggcacaaagatgctcctctgattcctcatccttggtgtgggacctgtttttctcccttctggaggcttattgaaccctttttgtgtcccaagtgtcctgaagtcccctcattgggtacctgatacgtgtctgatttttgtcacttgcccctccttgggcctttccatccatcttttccaacctttcccatgattctggtaaactttcttgaatggtttcattgattatttgctctcctgtctttcttgtttctatttcaaactcccatcactcgctattgggctttcagaactagtgttccactttatcttccccacctccgttttctacgttgtcttttttgtttttgttgttgttgttgttgttgttgtcttcaagacaggatctcactctgaaatgagacagagtctcagcctagagtgcagtggtgcagtcatagctcactgcagcctcaaactcctaggctcaagtgatcctcctgcctcagcctcctgtgtagctcggactacaggtgtgtgccaccacactggctaattttttgtagagatggggtctcgccatgttgcccaggctagtcttgaactgacctcaagtgatcctctcgcctcggcctctcaaagtgctgggattaaggcgtgagccaccacacttggcctctttgtcttttttattaatttgttttctggaagagttcctcagcttcctcacttaacctgtctattgatgtgtttttattggtgtttttcatttctgcccttttttgtcttctgaatattccttttgttataagccccgttcttctttcatgatgtagtatcttttatttctgaggatattgattgacgataggtttaaattctttttgaaaatgtcttctctggctggacacggtggctcacacctgtgattccagcactttgggaggctgaggcgggcggatcacctgaggtcaggagttcaagaccagcctggccaacatggtgaaaccctgtcactactaaaaatacaaaaaattagctgggcatggcggtgggtgcctgtaatcccagctactggggaggctgaggtaggagaatcacttgaacccaggaggcagaagttgcagtgaaccgaggttgtgccattgcgctccaacctgggcaacaagagcaagactccgtctcaaaaaaaaaaaaaaaaaaatcttctctgtcctctgtttcttaccaggtttttgttttttttttgatagtttattttgatctctggggatcatagtgcaggcccatctctctgatgcttgggggtaacgatctagtgtaatgattacaagtgagggactaggtgcagtggctcatgcctgtagtgcagcactttgggaggctgaggcaggaggattgcttgagcccaggacttcggggtcggcagtgagctgctgtgatcacgccaccacattccagctccagcctgagcaatagagtaagactgtctgaaaaaaaaaaacaaaaccccaaaacccaaaaaacccaagtgggcaatggatgctggtgatgggttgggatgcaaggggatagcggggagggcctcactcggtgctttacccggggaggtctgggtgggctgtggatgcaggggaagggcggggagggcctcacttgttgcttttcctggggagatccgggtgggctgtggatgcaggggaagggcggggagggcctcactcggtgcttttcccggggatacctgggtgggctgttatgggggagcccacatcaggccctttgggtctctccccttgggccagccggattgcacagggagtagccctccagcctcctgcctgggctcctaagggtgtcacccacatcctccactgtgcccagtgtccccagcccagacacccaccttctctggcctccccagtaaatgatcctagggagtccagcgaggaggggcaggcggccgccagggtgccaggaggggtcgggtgctgcggcagtcctcgcgcagacctccgttttgagcacccccacccttgtttccaggggaccctgggccatgaggcgtggggtgcgtgcccgccaccaccatccgtgtctctgctgggaatggctccctggtggccgtccgtctgctcgccacgtcccacccccagcctgctgtcgtctccttttccatcctccctgtccttgcaggtgtgtcctccctaaaggcactttctcgtggcttcaggagagagatgggtggcgtgggcttgccagcctaccaaggcatcacttagagccaggagccatgagcgtggcctccttcctgcagttgcctctggctgcccaggagggatgtggtgttgcctggcagggagtggagacagtgaggccttctaggggtcctcccttgaagggtcagcagaccaatgtggaagtcaccaaggatgaaggccagagcctgggggagggtggagctggacacccctgggaagtctgggagaggggctgagcctccacaggccaggggagcaggggaggaatggggccggggccggggtggcatctggggccactcccggtctcttgctgttggcgttgggagggatctcgcaccacagcagggaatcgaggccccggctcccctcaggctctcccttcaccggcaatgggcggcgggcgacgggtgacgggtgacgggtgatgggtgcagcacccgccccgcccataggagagccctggtccactgtggcctgtggatgccgcccctgacgtcagcatctctctctggcctccctgggagcagtctcagagcagtgaagagctcttcacgtccggtgctgtggcgatactaagtaataagatctccaggttttattgggcattaatatttattcccatgaaaaggttaaatttatttcactttaaagccctggagagtgcaaggtggagccatagtcgcctctcctggcaacggccctgcccaccacgtacccacctctcccacacaggccagtcctggtgatggcctgcaggacagggcagatgtgtggggcagttgggggcacccccttttggaaggcactgctgccagtggggccggtgagtgtgcagagcccagggccaatgtgtgcctcctgcaggcaccgggcagccctggccactcctcagctctctgaccccttcccccgctctctgcagcaggcaccacacgagccaatttcgcttggcacgacgtcctgaagcaggccctgggctctgcggctgctggctctgagcccatcgacattctgatttgtattttttcatgctttggaaaaaagaaatctatttatctctgcgtcgggtcccgctctgcataaccggaggcaaaccagcagccccgcccgctttctcattttcctgggaaggtagcagcgggtcctctgaggcctgcgtcaagaatatcgggctgtcggacgcgtcagtcttcaggggcaggtgacggccgcactgcttccagctctttggcttggtgtttgggcaccagctgacgggccagccagcagcagcggtgctgaggttagtccaggtcccctgaactcgacggccatcaatcccgggcctgtcatttgcaagcagctgcagcagctggtcgagcctcctgctagaccctctctccaccccaggtttttcttaagggtctgtgacggtatctgtcagtggagactcatgttagccatgtcaggagggcctgtgttggagaaggatggagggaacagccccgagcccagggggcctggcttttgctctgtgaggctcgctccacaccctgttcacttcctgatccccttccccaccctgccttggtccttaaggaggtgaagatggggcacgggggtgcacggccacctcctgtagaaccagggcaggccagccaccttctgagtagcttccgagctcctgaggcttggccacccgcacatcatggggtgggtgaggagcagaaggaggggccctccccacggctgcctgcagtctggccctcccctttttatctgggaaaaagtgtcctgtggctgctgggtgggtggcagggaggctggccgaatccctggccaatgagtcccgctggcaggaccccgagaagcagaggagctcgctccagctggtgcccctccaccccggcagcagcaggacgagcaggcgtgccagcacagctcctgggcacctgcccctttctgctcccgggtcccctggcttctcatatgtgcttattttgtctcccagttacactgtgagctgcttcagggcagggcccagcgttgcacggtaaaactacattaattcagactcattaattcagagcctataatagttcagacatgggagacgtgactctttttgagctaaaagttggaaaccgttttgctctgggtttttatggccacaattgcagaacctaatctaagatcagtaccttttttttttttttccagcaactaaaatcttgggaaattaaaggtccttaaaacatgctttcaattgtgagccagacagttctgaacccggcaaagagcaggcacagggatgctctgtcttggaagggggttttgtctgggaacgccacttccaggattcagacctcatgtgtgtccctcgggagcttccaaaataggactgcttttaggtggagcgtattggaactgatgtcagtgagaaaatggacaccctcacaccccccaaaaattagaaacagaagacctcactcctcaggccgtgcctcttctcttccccagaccctgggcaggtctcagcaaacccgggagaaccagagcctgactccaggtcccaaagttgtcatttcagggacctgaattgctgttttctcccatgtatgagtgtctgggctcattaagataactggggccatcccagccggaatgtgcaaagtccatgggctccgggagtttggagctgggtcaggtggtgaggccgggagagtcgcaccccctgggctccgtccgggcagcaggatccaggtccccatgaggctgaggtgcaaatggccccgctccctgagctgcccctgagttctgggggcagcgtgcccacagtacatggctggcttgggctgatggtgcagagggcacaggacccagagcggggcagagcaggaggccaggactctccatgcctggagccggactgcttcccggcaggggcagtcagaggcccggaagccggtagtggggcgcgcgcagctgccacgctcagtacaaactgggactgctgcccatgtctgcaacagacacacctgcgattgctcccagagtgtgctgaagctggtctgtgggacgtggtgttcaccccgatgctgttacactgcgagttacactagaaaagttacttcatgacttaagtcaggcttcagcaagctttttcttttgagacagggtctcagtctgtcgcccgggctggagtgctgtggcatgatcacagctcactgcagccttgaccgcctgggctcaggtgatcctcccacctcagcctcccaagtagctaagacagtaggcgtgcaccaccacactcacctaattttaaaaataaatttttgtggagacagcgtcttgctatattgcccagggtggttttgaactcctggcctcaagcgatcctcctgcctcagcctcccaaagtgctgggattacaggtgtgagccaccatttgagccagcccaaacttattgtaaaggacctgatagtgactgtttgcagctttacaggccgtgcattccccatcttgaatgttcagccctgcccttgtagcgtgaacacagctgtggatgatacataaatgaatgggcctggctatgtgccaataaaactttattcacaaaaacaagtggcaggccagatgtggcccatgggcccaccttagaggatatgccttctcaataaagagatttagagaaataagtagcgcagaagtgtttactcctacaattgaaagaaccacagttattgttttgatacatttccctgtcttgagagagctctgcccataattgggctcttgctatattcatgaccgtgcattttgtgtttcttcaggtaacagacacatcctgaggacgtttctgtcattgaaagcgtcctgtagaccgcatcttgccagcgcacacctccctgttgtgtgtcgtttatttagtctgtccacgatggttgaacggtttggttagagtcattgtgtgtgtgtgtgtgtgcgcgcgcgtgcaagcgtacttgtctttcagtacaaaagcaaaggacatctttgaattccttccttccttaggcgagatcgctagcagggggagattagggatgagcttgcctggagtgtgcaaagatccacgttgcacccgtcatctgcagcttggaagagctgctcagctcctccttgcatcctcctgaggccgccagggtctgctccatgctcactgggggccgagtaggggccgtgatgctgacgcaccctcctcctctgggggattccgcaggacccagcagccacccggcagccacccctccctctgctgtcactagctttgggcagcgcgtgtctcctgcgtgcaggagcactgtgaagcctctgctgattcgctggcaagcggcactgtccaggcccccagaggtgcacttggcagggtggtcaggctgccccctgacatgagcactgtccaagaactgggttctgcttggcatctggggcaccaagagggggggccttgctttgagaccctgctctgcgggccttagccaggaatgagaagaagcttatgggttccagcccagcccagagcagtgagaccaggatcttaggactggggagaacggtgggggcagagagcctgcagttggtgggcccaacctgtagatgagaggctgaccccaaggcagggcaatccagggccgtgacctgcagagaatgcggcgtatttgggaacaaagaccctcagtggagactggcagtgggaccctggcttcatgctccgcgttcctcacctgagtccccacctcctggtctcggacctccacctgtccccagaggctgttcagcactgagggggcaccgccaccctgcgttggccagatgcgcccagcttccccggcagctctcagggcggcctcacccatgcacacggttctagcggccatgtgtatcacaccacacgatgggacacaggccctggggcgtgctcaggcctttgggggccgcgcagacctcctcttgccctgtttgtgcctgatttctccatcagaaactaatgacacagccagattcccccggatggtgccttccttatctgtcgcgagtgctgacagaggaccaccaagttgggcagcaggaattggagcgggcggggcctgttccctccagtcactcctgcacagcctcacagacacccgtgtcccagagagtggggagctagacagggctgtggtgagaacagtcaggggcctggctaatgaaaatagacagcgaggtctgccctgccggaggactctgtggtgaggctccctccggcctgctctgaacccttcccagctgcagtagaacagcccacagaagtcctcatgggcctggctcacccttttcatgggcacgtggctcccacaggcacgcagccgatcagaagaggccggagttggtggctcgcagtgggggctgggcatgttcagcaggaggctgctgctaaggggagctgggtctcctcaccagccctagcgggtttctctcccacactgtggccctgctgagctgcccagcactcagaagcgactaccctgtgtcctcgaaggctgtgcttccctccctgtgacccaccggccttgcctccttcctgctgtttgcttcttgggtgtcctggctccccagctccctgcagagccacgtggagacttgcaggaatgctcccagccgccacctccttccagtccagccgtgggcagcctggcaccagcagctttgtcctggcagtggcagcccctggagcaggggatgcatctggagccgtgccagccccagccgggcaagggggctcaggccgtgctccaggccgtggcagtgcactccgtggagcgtgtctgcctgtcccccctccacgggtgcacacaggtgctttttttaattaaggaaaagcaattgcaaagccgctcaatacaaatcccctaagctgctgtggatggggatgccggggcagtcggcctgtccaggagtctgaaacgccggcaccatctgtgttcctgccactccatggccaaatgacaccaccagcctttctctcctgtgctatctttcattaaatgaattgagtttgctgggaattgcccagccacaaatattccctcctgctcagcatgataggaatctaactgttcccaagcccctgctcctggatccagcagaaggttccatggcccccctgggactgggtaaggtggggggaggcacgagctgcaggaaattccacaggaaggtttccgtcgtccccaaccccgtcagatttggggtcgtaaatatgtgagtgtctccaagcaaagtgtgggccacctggaaaggtttgtcagggcaagggaatagttgcgttgaattaagtctttcccttcccatttccttcatcccattgagcacgggtggtgacagcaagacaggtacttgaaatggaagagtgtctcacgatttttggaaatgggcttcttctgtgcctgtttgatggagaggcagaaagttccctgtgggcttctgaggctgagataagggttggcagaggtcggggcagcctgtgtctggcacgcggtccctgggcccgcctctccccagcaggagatgaggtctgtgccccgttcagacgggggcccgtgcctctgccccccacgccccgagcttccgcatggccctcccccatgcctgtggagactcccaggggctactttgtcccctagaatctagaccagcaatttccaaactgctgcccgcaggtcaactctgtccctggcctctgtttattaataaagttttattgacacacagccatgcgcatgcatgtgcccatcatccgtgatgctttagaggcacggtgcagagtttctcgaagctgaaaacactcagcgtttgggcctctgtgacagttggccagccctgccctttcccccttcctcttgaggttggggtttttccagccccatctcagcctcatcccagtaggtacgtgacagaccagagcttcctggccgcctcctgggatctgagtgccatggtggtaatcgccgcttgggcatctgggttcatgccctctggggcctggcttctctggccccaagtccctgaaatgttgagcatcaccaggtcacctgcagaacatccttcccagtgcccagtgtgaccaaagtgacgcagcggcagagccaccaagaacagtgacctgggaagggctgagggcgtgagagcggcaggtctgcccggcaggcagctggaggggacttcaactcatccttgccactcgcttgacgttcccaaacacaaggggccatcctattgggtgtttgctcaattcccccaagaccccaggcaagccggctgcagcacatggcacgttaatgtcctttcttagccgctgagtccctgagcctcccagaccctcagcatcttcttcgttaacattgtcgtccctccagccctgcaagctggaggcagtcaggtgaggcgtgcgggagcctgtgggccaccgtcgccctcgtgaggcctcctgaggaggggccgttgtcacattccgggattcctgttggttctctcagctctttggggactgctgttgtctcccttcttcccagccctcttggaacgattgctgttataaaatactccgtatccatttttacctacctgggggcacccgcgtctgacgggagggagatttttgcctggaccaacaggaggcatctgaacctcagcctcgctggtctctggacagctgtgcgtggggcagtgcccagtcctgaacctcaggcccctcactgagctgcgcccagcccccatttctcttgggtgtttgctcagtggccgttccaactccgtggaggcaaaccagggactcacaactgggggatgccgtttcctgacttgtgatagaagttctagaaacagagcaggagtgctggtgcacacctgtaatcccagggttttgggagactgaggcaagaggatcacttgaacccaggagttcaagactagcctgagcaacatagcgagaccccatctctaaaaattctcttaagaattagccagatgtggtggtgggtgcctgtattcccagctacttgggaggctgaggcgggagaatcgcttgagcctgagaggtcgaggctacaatgagccatgattgcaccactgcactccagcctgggcgacagagtgagaccgtgtctcgaaaagaaaaatgttctagaagcggaatgctcagcggtgggatggggtgtgggaggcccgggccgtgagccctacctgctctggggtggggtgtgtggagccagccgtccaggtgtggcgcgagggctcagaccgtgtcccctgccgcagtgcacgtgccggaaggacatggtcaagatctccatggacgtgttcgtgcgcatcctgcagcccgagcgctacgagctgtggaagcagggcaaggacctcacggtgctggaccacacgcggcccacggcgctcaccagccccgagctgagctcctggagtgcatcccgggcctcgctgaaggccaagctcctccgcaggtgagttgccaagggactgccgcgtgactgcccagcatcacggggggtggccctgctgggtggcccaggccccttcccactggcaggggctccgggccgtgtcccactcctccctttcttcctattcccaccccgcctcctctttcgtcctcctcctcctgttctgtttctcctccagtctgaggcacagtgttttctcgaggcctcgctttgctggggtgggtgggctctgctctggcgggcagcgtctgtgccgttcacacccgcgggctccccatactccctgtcatgtccccgccaggaggctgaccctgggtggccccaggccccgtgccattgcctcagcagagccaccagccacatggctccctgtccctctcactcaccgcatttctgctgtccggctactcgggcccctccctggcgctgagagcagtcgggttccctgcaaggactcaacggggcatcaggtggggctgcttggatttgagatcgtggagaggatttcagaaggccggccccggggcgtgaccctggatgccctcctcccactcagaacccctccctgcgtatcgccgcacagaccctcccagccaggtatctggtgtccgcctggaggagaggccaaagcatctgcagcctcttggcttctgaccacaagaggccatggggacacggaggcaggtcccggcctaggaggagatccacttcatgcccagagtgaaggcgagcaccggcctccccagcccctcctctgggaagtgtccaggcttccagggctctgagctgcccttggcacagttgtcgacagatctcactcctgtttggtgcccaaggaacattcagggagcccctgagcatgagctggagccgggagggacggcacagagtgggctcagccaactcctccggggaagggccagagagcaaacatttgtgacttggcgactttgcaggccaggcctcctgtgtctcgacgtctcgactccgcatggcaactcaagacccttgcagatgatagacagcgaagaaatgcgcgtggctgtgtccgtgaagctttgtttacagaccctgaaatccagatctcatgatttttacatgctaccaaatacgataatttttctgttttgagccacttaaaaatgtgaacattggccaggcacgatcgctcacacctgtaatctctgcactttggaggccaaggaaggaggattgcttgagtccaggggtttgagaccagcctgggcaacatattgagatgccatctctacaaaaaatttaaaaatcagctgggtgtggtggtgtgcgcctgtggtcccaactactgagaaggctgaggcaggaagatcacttaagcccaggaggtcaaggctgcagtgagccgagattgtaccactgcactccagcctgaatgacagagcaagaccttgtctctccaggaaaacaaacaaacaaacaaaaaaacatgtaaacactgttcctagcttgtgggtcgtacccagacaggctgctggcaggtctggtctttgagccaacagtggtggccttggtgtgggggcagcctcccccttccctttgagcagtgaccttccctctgcagccatccagtctctgctgccttgatcttgtcccagctggcgatggatggtgcccactcgagacccagccactgagcaccaaggttgggggcggctcagccttggccccccaccacgctctgcagaaacaggccttggaactggtttctgaaaagtcacttctggtccagaaccttctcctctaaatgggcgccttctttttcaacacgtccatctgtctgtgagtctgggactcctgggcggtctgggcatctgtctcggcctcctctgtcttccccacctcgcggcctctctcggagaatgttccctctgccccgagtgttttcacagcccctcctgacagccctgccaaggtgaatctgtctcttctgctcttgttctgtccttttgatttcctgcctcctgtgtgctcctcatgaagagctgcctcctggtgaggctactccaggcggcccccgcagcacagagctcgtgcaccccagctcccaggcccagccagacgtgctatttgcataatggttaattgattgtggctcaggctaattggtcaacagagtggattgccaataaaccggcaccacgttccaggagtggaatgggactagaggccgtctaaattgcctgccaggaggagatgcggaagccgctgcgctcaccgctgcttggaaccttctttgcacgcaggaagtggaccccccagaaccagcccttgcgtggcctggcctggcctccctgccccggccaccccctcacttctagtcacgacctgctcctcccaggagccccctcccgccctctcccgcgccgccatcctgggggctgccttcacccagcagcaagcctgaataacaaatgaagtcagcttcccaaggatataattttcttgaaagccttcagtatgtaaaacaaggctgattcactttttttttttttttttaaagtcattgggggtgcttttctctggagaggcagatgggtgactcacgttccaaagcccaagctgcccctccctccaccagggaggtggtcggttcccccctgagcagtgccctctccacgtggcctgccttttcccctgagccaggctccctccctgagggcatatcttggggccagggcagccctgtctgagcatctgtggctcaggctggatcgggagacacagtggactggctctgtctcccagacaaggggcttgtggacacaggcgggatccttctctggttgggggagcatcctgggccctgcagggtaatgagcagtatccctggcctccacccactccatgccaggagtgccccaagtcgtgacaaccacagatgtccctagacatcgcccagtcccccgcgtgggaacccctgccctagaccaagggatggcatcagggtgggcgccatgccctcacccccgtgcagtccagccttccctgccctcggcgtggctgtgggatggccctcatgtgtttaccaggtgccccatggggtgcggatggttcggcacagctgcctgagctcagaggacacggcctactccctgctcgccaccttacatgggtctcttccagaactaaatctcgttgagcgagcgttgggggctgtttgtattcttccccctgatggatgggtcgcctaaaactgcagcctggctcctggcgggtgccctcagcctccccactcccggtggcgctgtgcgttctggtgccctgcctgagccggagccctcacagtgctctctggcacccacgcgacgctcctccatgcaaactctttccacgcgagaagcgccatgtgcacgtgctccagcaggtacgcgctccctgcaggacatctgtgcacccgcctcaccacagcctccctggcccactgctgctctgtgagcccggctgggcccaggcctcgtctcccctacccctccgagctcggtgctgcctgtcccctcctgctctgccttggcctgtcgcccctgcgccagtgcaggacaccgccacgcctctggccccgactcctgccagggctgccacggctgccacaccccagctgcattcctgagccctccccaccaacagggacctcagccctcagggacagaacctcacgagcacagggacctgccagcccctgcagggagtgcgcagcctcagggactcacttgctgtctcctgtctctttcctagagctgcccttcattttctcaaaggtgaaattcctcagcacagggtctagtcttgggggtggggagcactgggccactttgggtcgggggtgggcggctctgagggctcagcctggggccagcctcccagtcctccccaccttgtgagaagccctgagccagcgcggcactgaatgctgatggtcccactctgggtgctgcaggtgccctgtgttactgggtgacagggccagaggccgtccaccccgcctcctgccatacaagctgcaaaggacacctgcttccaccttggaaatattagtgcagttatctggactatgtcccgacatttggctcataggaatgagcccagcggcgtccagttaagcctggcaggctaagtgcttatttatctccactctctcctgaaacgccactgaaacaccagagagtgaagtgcagagaacgggagagggggcagtggcagctgagcacgtctccaggctttgaaaagcagggaagggtgggcaggagaccccatgggccggcaaccaggaggacagccagcagggagcagctgggctgcaccatggggccacagaaagacacagtgggcagacatgggcagctcctggagggctgcagggggaatgtaccacggggcctcagaaagacacagcgggcaaacatgggcagcccctgggggtgctggggggatgtgggggcaaccagcagaagacagtgggtggctctgggcagaagggaggcgccttcctggggtcagcagtggggcccagctgccagcctcacatccccccaacccccaaggccaggagagacaatagagggggtgggggtcctctgccagagaacaaaggggcccagtggagcaaagccacatatgctgatactggggctctcctaaagtcacaggctcctgccctcagcagcccctgccactgccttcaccaggcccagctcacacacggcttggcaccgtgcacagagggatcaacggccaggggacccgacacattggaggctgcgctcccatgacaaaggcagggcctgcacagcaaagaagggcagagctccgaggaaagaggatgcagtgagtgcagggccctggagtgggccgggactttgcattatggaaaaagagccattgctgtgaagaagaaacattccaggaacgagtggctctcggatgttaccatctagagaagagacaagcccacagtggattgggaggcccttgaagaatcccctcccacagcactgacagacagagctggaagataggaaggatcaggaagtcagaggcgtagtctaggaaatctagcccctgataggagtttcagaaaaagaaaagtgtcccgggacccaaaggctttgcatttccaggttaaaaagtccaccagaaagtccgcccaagaatggaaattacccaaaccacaatgcatcgctgtgaaatttcacaattcctggattaaacaaaggccctgaaagcttccagagcaaacagatcacataaacagctcaccagactggggctgggcatggtagctcatgcctgtgatcccagcactatgggaggccaaggcaggaggatcacttgaggcccagagttcgaggtcagcctgggcaacatagcaagaccacatctctaaaaaaaaaaaaaaaaaaaaaaaaaaaattataaagaataggagactctgttagcattggatttacagtcataatgccacaagctaaaagacaaaggaaaaaggccttcaaaagtcagaagaggaataattctccccaaatcttttacctagccaaattgtcaagaaatgtgtgaggggaataaggatctttttagacacacagagtctcgtattccacctcctttctcaggaagctgctgcaggatgtgctccagctaaacaaggatgtaaatcgagaaagccatggggttgaggaaacaagatctaacccaggagagtcaaggggagtctcaagatcatgggagaaggaaccaagacccccaggggtgtcatggagagaaggggacaccctgcataggagaccacagcaggagtttaagagcaatggcagggagctcagagataccaaggaagctaggcgtccaaagcaggaggccagttccagaccccagggtgggggcagggaatgcggcccgagttgctctgtggctcatggatgcacaatgtttatggggcataaaagcgtaaacgtggaatttggctgcaatggaagacggtggcaggtgcagggagagaaggggacggtcatggaggcgagcaaggatggccacaccctcaacacctgtgccgggagccagacccagaaacaagcattgggtgcagaaacacgcgaagggggatgaagatgtcagggtcaggaagaggcgtgctcttaggaccccacagatgccccaagtgatggctgcccctctgccgtgggctgtgccccccttgctgtgtctgtgccgcccttgctgtgtctgtgcattgagccctacccagttccatgtagtgtgggacccaggggtctcagcctggcactactgcaggtaggaaagggctgggctgcaaggatgaggccccagagctctggttgggcaccaggacagttctggggccctctggggcagacacagtaaggcttgaaggccgtgggggtgcccctggaaggctgcagcaggggagggccatggtcggaagcgacctctagggtgagttttcagggtgggggtggagggagggactgcagtgggtgggagaaggggctgtggagctgggggcagctgaggccaggtgagcggcatgggagggcgcccttctgctggtgctgtctgggaccagggcgggtccactgtgggatcccggccctacagccctggggcattcccagaccaggagggcagcccaccttgggatgacagtggtgacaagagccagttgcaccccagcgccggtctgaagcttcctcctcctgagcctgctgtctccatctggggcaggcacccagcatttgcctagccccctagtggagcctgaggctgccttcccagagccgtccttgggctgctgttgtggagaacgttctctggagggcaggggccactcccgtgtcccccatccacctcctgctccctgtgttagtgactctggccccacgcccgcccctgcctgcctcccacccctgcccggccaccccgcagcgaccttgtgtgcaccatgctgtgtgatgccatgcctctggtccacccgctttctgccttgagtcattgtggtgggccatgctgcagacatcggggagcactgattctagcgagttaggcagctgaggagcaaggagggccggcagtgactagtgttctaggaaggcttcctggaggaggcgccccagaagccagcatggagcacagggcgggcagagtggctgggagcagcggtgggcaggggtcaggtccaagtgtcccgagggagcatgggctgctgctggcccatgtgacagcctggctcaggcagaggtgaggaggtcctggtaacagaagccccggcagcgggcccaccccacccctgtcagatgagcctgccccaccttggtgaccacttggtccttggaggggcagctgccacagggacccccgtgggattgaggtgtccgagtctgagcccatggggacaggggacacgggaagcacccggaagccgcagccggcattggtgattgtcccggaaacactggcgctcccagctctgcctgactgctggcaggcttgacgtggctggatctcaactggggaaggggagaaaggccactggggagccgggctgtgcggcctcgagctcatggcctagagaggcccctggccaggccagggcttagggcagctgcagggggtgggcctggaggaggtgcagatatcacatgcccaggggaggcactagtgaccagccaggcctcggcttctctgcactcccggcttctgcctgagccccctgggaaccaccccctccgcatctccaaaaagcttttgcttccttcctggaaagaccctggaggtccctgggggaacctggtgtgaggccctggccgctcagctgcagggtcacctggctgtcacttttcctccctttttcagcccctctctctcatttctaagaagtctcagctcagccaagcctgtaagcctcaggttgaatcccttacttggggctggtgtgcagggaccgggacctccccgatgtaccccaggattgtgggtgtccaggttgggcatgcaggatgcgcctcctcttggcccacgcctgccccgtgagcagatcctgggctcagggcgcagaggaggccctggcaggccctggggtgtgggcacaggtcagagcagcggagtgtgagctggggctcccatgcacctcatgggctgcagagagaggacccagggagttggggacagagccaggtggccaggaccaggcgtcctggggagttgagcagaagtcctagagaaaaaacccgtgaaatttacattctagacaaattagtctgaaagaaaacagacactggagaaagactgaggaggagaggaaaccaagtctagaaaggaagaaagagcagaccaaaaggccggggctgtcgtaagtgtctttttcgttccgtttgtcgtctaggcattttccatgagctgctgtttccctcggagctcacactccctgtgtctctgtcccgtggcacacgcggctcctgccgccccgtcccgcccgtcatcccacctggtgtcagtcggcttcccatctccagctgtcatcagcgtcccccgcttgacaccgtccccgccgtgtccattgccccgtctccctttggtctctcctcccaacacggctcctgccccgcaagagcagaaccccacccagggttccctttacccccggcctccagccaggaggccccctgctcatggagcgctcttctgggggtgggcgggggctgcgtgctgccggacagagtgcacagacctagggctcttccctccctggtctcccctcctgcctgataaacctccctctccaggtctcaccggaaacggagccagcccaagaagccgaagcccgaagaccccaagttccctggggagggtacggctggggcagcgctcctagaggaggctgggggcagcgtgaaggaggaggctgggccggaggttgaccccgaggaggaggaggaggagccgcagccactgccacacggccgggaggccgagggcgcagaaggtcagtccctgccgggccaggcctggcaccgctgttttcccacccccgtgggcatctcctagaaggaaccagtgcctgctacagccagagtccccgttttgtaagaatctgattcagtggctttcttgccagggtggggcatttcgtgaaaatagacatcgtaaggtggaggccgtaagaaaagtgcctccgtccccagaattgagaagagcagttacgagaggccaggcgcagtggctcccacctgtaatcctagcactttgggaggccaaggtggcaggatcacttgagtccaggagtttgagaccctgtctctacttatgatataaaaaaaatttaaccaggcttggtggcttgcacctatagtcccagctacttgggaagctgaggtgggaggttgaggccgtagtgagccgtgtttgcacctctgcactccaacctgggcaacagagcaagacccagtatcacaaaaataataataataataaaagaccaggatgctgtatatggcccagatgctggaacgtgcctgcagcagccacagccacttgtgggcagagggctggtcctgactgtgagctggggcccccgtcagcaggtctcccacctgccctcgggcctccccactctcccggggctggcaagacagggggcagccgccttcccacaggagtgtgaaccagcagttgtgaacggggtgcggggggccgggaggcagtctcagaaacattaccttccccagggggaggttttggctgtggaactcccacctgtgagtgtgtaaaggttcctattccagggttgacagcattttgtttctggtgactgggttttatcttctcagtttagagctttagctgcttgggagtctgtgcaaagtggctgttcccagctagggctccccgctgggagcccttccctctcccaccctttccaggtgccatgcagggagcaggtttgtggggtgtgctggccagcctgcctcccaccaagggctgcccccagccacagtgcctgaggcccaggtcatgggggccacattcgccggagggtcctagtcctcagtttccctctgtatgagcccaacatgacctggtctgcctctgaggtgtcaggtctccaggacgcgctggtgcccaaggtgaatattgtccttggaacatggcaagaggcccagctgtggtgccattcagcagatgtgaggtccctcccacctgccaggggcagccgtggggtgcctgatctgtgacgatggggtcgtggccctcgcagtactccaggaggcaggcacgcccctgccctccccatatacatggggcagatattgagggtcacagtttgccagtgcctgtgggcctgaggcaagaaaagtgagcatccctgggggaaagagcagaggccgggggtgagtttgcccctgacggaccacttactcggtggggtacgtgggccctgcgtctgttcagcacgcctcaggagggtctgccggcctagagaggcaagacgaggacagaaaaggcatcgtgggtagaagagaaaagcacagctgtcgtggcactgttattatgtagcgacaattctctactgagaagcagcaagcaagtctacaggcagccgcctggtgactcggggatcgagcggagctgccagagatgagcgacaggcacagaaacccaatctcgcccctcatctgcgagccgctcgcagcaaacatggctcccaaagatgccccttatggtgctagcaaccagaaataatggatcttagaataaacctaaccaaaaaaatgatctttatggagaaaattaagagactttttttggaaataagaaagaattcctaaataaacagaaggacctaccaggtgttaggagagctcttaagcggacaactaacggcttcccccacattctctgcaggttcagtgcagctccatttgggatcccagcagggtttgctgatttaaatgcaggcggatgaaagcccaaggcctgtcaagaggctggggccacccttccagaaggcagggcttgccacagagcttgcaggacccaagcaaagatggcaaaaggtctaggaataggaatcccggagcagtggacttggtgtgagacctcagtcccctccctccccctgtccacgctgcggcctctgtgagtgccctggggccgctgaaatgaaggaccatgaccttggtggcgtaaaacaacacacgctccttgtctcacagctctggaggccaccagtctgacaggcctcactgggctaaaatcaagctgtgggcagggctgcttcctcctggggggctccaggggagaacctgtttcctgcctgtctcagtgtctagaggcgcccacatctcttggctcagagccccttcctcctccttcacagccacagtgcagcctcttccggtctctctctgactcttaccctcctaccttctacccggtgaggaccctgggttcccaggtctcccagatgctctcccatgtcagggtccttcactgagtcccacctgaatattccttctgccacgggaggggacagattcccaggctccagggataaggatgcagatgcctttggggtcattcctctgcctgccacatgcttaggcatttctgtcaaaagagaactggcaaactggaaacacaaagcaggaaagtatataacccaaggctaagtgattgtttattaaaaagcacaaactagaaaaataaagatgaacaaattcagtgactctcaaatccactgctgtttatcaaaggatgaacctttaagaaagtgagaagacaagccgataagtagggaagacactcgccacccgtcaccgaccaagagcagataagaatgcctgaggaccaggaggggctcagccccccaaggaagagggcaccagaagaggagatcccttaggctaatgagcccagcctgctctgggaagcgctgcagacacgctgctgtgtgctcctcggaccaccagaggtggaaacacccaccgtgcccagccctggaagccggtgcagcgggcagcccagtcccctgttgcctgggacctgcgtgagtccggctgcattggagatggacctggccttatccagagaagtggagcatttgcaaactgcacacccagagctgccctcagggcacgtttcctggagagaccccctgctggtggggcactaggactgtgcagatgcagggacaggcaaactaaccaacctccatcgatggagagggacggggaaccagcgcctcctgtcaccctcgtctgccctggaggcatgagcgctggaggccactgctccacgccctgtggctctcggacacgacctcgcgtggcacggggcttctcatatgctgtgctccgtttgtttaaagtccacagatggggcggctgaaatggctgaaatgtacaatctcacacctgtggaagcgggaaggtcacggtccaggtgtcagccgggctggcccattccgaggacccaggaggacctctcccaggcccctttcctgggcttggaggcagcacctttgtgttcccgtgttctcccggagtgtgtctgtccagattccccccttcctaaggacactggccacgctgggcctggcccgccccaagggtctcatcataactcattccgtctgcagtgacgcccttcccaaacaaggtggcaccccaggtccgggggctaggactgcagcaccattcaacagcacagggactcagctctgcagcaggcgaggggcttcctgcagggcaggagcaggcacaggtgcccatttgtgttgtcatcctgcagggcctgtgtctacactgcaggtcctctggggtttgggaaatcctcagaaataatgcagactccagcaggcaagctgggcgcctgagcatgggtcgtgctggtagaggataagttcctgggctggctgcggtagccaggcctcctgttttctgagcaggagtctgtgtttgattctggagacggtgagccccaggcgaggtcggcaggggagtgggggatgggcgcagttcaggttctattccaagggggactgtgggatgtcgctggagggactggcgtgggacagggaggtggctgagccgtgaccattctccccacaggatgggctggcaggggtgggctgggcttgggctggggtccctgggggtggggggctgcgtgggccaccttgagcttggaccttgtgaagctgcccttctcacgagtcagaacgtgctgggggctgtgtgtggtctcacaggagatgggtgagttatgggaaaacaagcaggcagagaaagatccaggcttgggtctggggacccgggcccacccaagcccacccgttaactgcccatgtgaccctgagctgggacaccgccttgatggacccttcaggagggcagagataagaggacacgcatcctccccaggccggcgcggtgggggaaatcgggcaggctgctgccgccgccgctgccacctgtgggttcaggcagcgaggaaagtggcccagtcctgggaaggcttttacagagtggagctggctggtcagagtctgtcctgggttctcagtggggcctcctgggaggggtcacaaggatcccccgtaccatgggtgtcttcctccctcttgagcagactctaggggctggccagcctctggctggaggaagggcggccaccagctcctgtgacttgttttacccaactggctagcaaaggactgtggcttcttttccttttcctttcctttcctgatggagttccgctctgtcacccaggctggagtgcagtgacgcaatctcagctcatgcaacctctacctcccaggttcaaacgattctcctgcgtcagcctcccaagtagctgggattacaggcgcccgccaccatgccctgctaatttttgtatttttagtacagacagggtttcaccatgtcggtcagaatggtctccaactcctgacctcaggtgatccacttgcctcagcctcccaaggtgctgggattacaggcccgagccactatgcccagccttcttttcttttctttttttttgaaaccgagtcttgctgtgtcccccaggttggagggcagtggtgcagtcacggctcactgcagccttggtttcctgggctcaagcagttctcccacctcagcctcctcagtagctgggactgtggacgtgcaccgcaactccgctcatttttcaaaatttttagtagacacggggtctcgctatgttgcccaagctgctcccgaactcctgggctccgcctcagcctcccaaagtgctgggattacaggtatgagccactgtgcccagctttcttttcattaatgtgactaactgttatttactaatcttcccaagcccactgacgagacagccacaccctccccagccccggcgttacctgctctcacttgggcctcaccatggccttggcctccaagagactcaggttcagggaggtcctgaaccagggggtcctggttctcctctggtctcccctccccatgcgtggtcctggctggatgggcggctttcctcccctgacagtggcagttgcccgctggagagaagcctacaccgcgtgggagggaggggaaaccaatggctcgtccagctgcctggcgtaggtgaggccctggcctggtcactcaccatcctgtttaaagatgtacagggcaactcgctccctcccgagatccccgggggtccacacgcccggtgcagtggtcacggtgccaggaggctgggcctggtgcatctctgaggcctgtggcttccacgggtctctgaagggatcagcccccacagaaaggccagggaccagcgaggagggttaggggctacgttggtggcacgtcagggtctctgcccagggagggctcaggactggtgctgcccaccccccgccccccgccctggacacccttatctctgttccacgacagagactcctgggaaggacccaatctggcaggggtgggcgttttcttggacacagccgttttcccgggagcccgaagtcccaggagcctctggacgagaggtttatctcgagagagcctcataaatgcatgttcacagtcaggggcacgacaggaaatgcatgccacagtgctgcgggaaagatttcctaaagcggtttctggtcctccttgaatgccagtttcacgcccctaaaagctatgacgctgaggcacctttcagggcctagcagtggggtgtggggttttgtgttttcatatggaacaagctgggaaggggccagaacctgttgctcacaggggccagggggcatcagcatcggggaggaagcccctcaggaggagaggtgcctggggggcggttgagaggctgcttcccagtggctgctggtgtcccctatcccattcttactggctgcttcaaggtctgggaagagcggccgccctattgcccagcgctaggagggactagcagccccaccagccagccctaaccccagaaccaagcagaaagcaggaaggcggcctcgtccacctctcctgagcctccggggaggccccgcctcctggaagaaggcctgcagtgcaggacacacagggtcagggggcagagccaggatggggacccaggagggctggcatagtgccgtcctgcctcccagagggtggaaaggctgcggtgagtggggcagccagcccccagcccttcccctcccctcgccccggagtgctgctctcaggagaggcctcgtggctggtgactggttttagaacacggaaagcaaaggctgccatgtctggagggcggccccagctcatagtgaggggctgtgagctcagcccggggacccgccagcacatcccagctgggcctctgggaccgtcaggcgcacccggctgcgggttcagcacgggagggtggcagtgttgaagggggtggccagagagcccctgagaccggggctggttggcccaggcatggaagccaagcacgaaacttgagggaggggccccataagccaggccgaagctggtgagttgatctcggcagcctcggagcaggaacagagtggtgtccttggaaatgggtggtttcttgccccctccacagggcagcctgggcctcgggcctgtcttggggtttgctggaggctctggtggaaaccccggcgctggggaggagtggcctcgccaccaggcaggctagtgagccctggtggtggggtttccgctgtgacaccttccctccacccaaaaagagtgctagcagggcctcagctggctgccctcgggggcctgggtgcatcctgggccccatctgtaccatggtccctgctctgtcctgaagcccctcacccgcttccctccctcaggccaggcaggtgaggggcgtgccaaggtccctgtggagtgtagtccccatggcagggacagagccccaaggaatggcccacagcaaggacagagccccgaggaatggctgcggggtgtgccgccgtctttcagggtgtccttcctagccttgggcatctccctctaacagggtcccctgtgtgtctgcccgggcttcactgagcctgggagccgacagggagagggctggaaacttgttcttgtgagtttgagaatccagggcaccagcaggtgcgggctatgcgtggagtgcgttgaggctgccgccattgtcattcactgctgtctccagacaggggatggggtggcactcatcagccgggcacctgaggctcaaattatgtcccactttgtctcccatgcctggtccctccgggagacagaaccaggcagccaaccagggagggctgtggggaagcgggacttggggccatccctgtccttggaggaggagggagagagccctacagtgtggcccttggtgagaggacagcccccgggaggcctaggggacgatggtggcctcagctccccacccagccttgcctcccgagcagaaccagggcctggggcggtcacaccagccgcccctcagctcccaggaggccccgttggtcgggggaggatgccagccccttagagaggcggggactccccagggaccctctgagcaggcacctgtggtctcgtgaggacagcccggctctgtgtctctggccccacagccctggctggagtcccctgtgcacagagctgcctgttgtgtgtgaggacagcccagctctgtgtccctggccccacagccccggctggagtctcctgtgtgcggagctacctgttgtgtgtgaggacagcccggctctgtgtccctggcccccacagccccggctggagtcccctgtgtgcggagctgcctgttgtgtgtgaggggtgggtgggggtgccggctggggactctgatgagtgtttcctcctcgcctccttccccaattcctcatgtgtgcactgagtggccctgcagctggaggccgtgaggctgtgtcctggcatcttcctccctctcctgagaccatcgatgccccaggtggggccctcctgggccagatcccacgccagcccctgcccttgaagttgaacccggcttgggaagccggcccagcagtggggggcctgagtcccagtccccggtgaggctggatgggcaccgcagcctgcagtcctgagtgaggctgggcaggcgctatcatggacgaaggaatattggatttccttaggggaacaaagctgtttgtcctcaagtgccttttacacacgcaggacagtggctttcctgacaggcgctcggggtgaggcgtgcggcctctgcagcctccccgggctgctccagcttccagccctggtgaagcttccggcccctcccctctgcatctccacgcctctgctcccagcctcccagggagggggtgcctcccctctggcatcggcagggaaaaagtatttcttcccacgccagcctgtctgctgtgtccagtgtttacctcccctggccagataacagctgaggggccagataacagtggaggcggggggcgggggggggggtcatataacagcggggggcccggataccagcggaggggaagactgcgctccctgcaaggccagacaggacctgggggtgttccaggctcccctgccggggtggaggtcagggaggagcccggccagtgcccccagtgccccagaatgctcaggactagcaggggtgggggccagggcagtggcgggggctgccttcaccttatggctgctcgcctgtccttcttgagaaacaggtgggcgtgtgcctgccaaggacaccgtgggcggtcccccaagcctgcagatggagctgggtagggtgtggggaggagagctggagcagggagggcagggccgcctccactcctgggggaggctgtgggctgggggccccttgtgggagtgtgtggggcagtgtggcttcctcctggctgcagggtctgttgggggagggtcctcacttgacccttactggggtcagtgtgggtcaagggttaagtgtcaccctcggcccttgggagcctcattgctgagggtctcagcgcttaccactggtcctggcatcacggactgtggagctgggggcagcccgtggtgggttttatagcaagtggtgagatgtgggcgctgtgctccaaaccagaccccgttaagtgccacatggtcaacagtttagtgtgcagaaatgaatttccttctcttaatttttccttatttttccagcctgttgggggaggtggaggtggtgaaatgttagcagtgaccagttcatcctgatctgcttgggaccttccagttttagcactgaaagccccacagcccaagaatcccttggatatcaaccacggttcctccttccagaatgtcccaagagccttagggcctggagacacacaggtgggggcctgagcccctgtccccctcctccagatggagcaggcagggccccagggccccagggctcacggtgttctggggtccacagtgtgctgtgcggccaggctggtcttcctcgaggacagggctccaagttgccgtgccacaacttaccctgagtgcggcggccctcagagggattgccccggcacgagcttcccacagcccgacacagagcgccgctgggctcacatggagctgtgtgcagggacaggccctcctgggcactccaggacagaaacctttcccagcatctagaggcccctgcatccctcagctcgagtcccttcctctcccttcacaggcacagcgcagcctcttccagtctctctctgactctcaccctcccgcctcatcttgtgagggccttgtgaggacatcgggcctcttggatcatctaggatcacctcccatttcactcagtcccacccacagagtcccctctgccagagtcccccatgtccctctgtcatgtcccacatccacatgtccaggagagttgggacccgcacgcttctgggggctgtgattcagccagccaggctgctcatcccagttttattttatttactgcaaacccgtcctggccccaaagtaaaatgccaccaaacacatgagtcaactgtcccctccctgtcacctgtcaggaaatctccccattgctggccccggggagttccacgcggaagggtgtcgggccccacaggcccatctgacgcttcctggttcgctcatgtgaccgccaggttggggttcgttgattaagattttgtgcgttgttcaaggttttactttcgtcaaaagcaaaaccttaacgtttctacatcaacagtagaaatgtacgtaattcggatacacgagaacacaaaaagtgcttctcccccacctccaccgggaaagtgccatttggtacggcccacccaggtgggagcccagaagacagagcagcctcccctggctgggtttggtgacgcgtctcctcacctcccgtgaccccagaaggcacatagagcaacacctggtgggtcctcacaggccttggcaggcaagtgccgctgctgcgcctgcgttgtggggagaccaaggcctgggggtgcctggccaggtgcccctgcggtgatctgaggtggcccgaagcctgtgttctctgcccacccatgttcgtgtggcctctctgggtggaaggagccctcgaccatcccagtcaaagttgggggatttctggggagcgtgggaccagcacttgagcccgggttctcctccctgacctccctctcctcttcccacagaggacgggaggggcaagctgcggccaaccaaggccaagagcgagcggaagaagaagagcttcggcctgctgcccccacagctgccgcccccgcctgctcacttcccctcagaggaggcgctgtggctgccatccccactggagcccccggtgctgggcccaggccctgcagccatggaggagagccccctgccggcaccccttaatgtcgtgccccctgaggtgcccagtgaggagctagaggccaagcctcggcccatcatccccatgctgtacgtggtgccgcggccgggcaaggcagccttcaaccaggagcacgtgtcctgccagcaggcctttgagcactttgcccagaagggtccgacctggaaggaaccagtttcccccatggagctgacggggccagaggacggtgcagccagcagtggggcaggtcgcatggagaccaaagcccgggccggagaggggcaggtggggtggagcgggggaggcagggaggaggggggcaggtggggtggggcaggggaggagggggcaggtggggcacaggggagctggtggcgggggagggggcagggaggaggggacaggagggctgactgctggtttcacagggaactgtggctcttctcacagggtaggtggggtgtctgtacttagagaacagaggagccctgtggttctttgctgggacagtcaccccaggagaggagactcaggcctcaggcacgccgagcccctgtgtggctccgagggagccccacccaggggtctgtagcggggccctcactacagcctgttgtgtgtttcaggcaccgtccacattttccaaattgaagatggagatcaagaagagccggcgccatcccctgggccggccgcccacccggtccccactgtcggtggtgaagcaggaggcctcaagtgacgagggtgagtggggggtccccaggtcggctctcatcagccctgctccgcgctctgctgctgctggagggggggcctggctcccctgcggcttccttcccccacttcctgggtctcctcccctgaacccaggcctttctgtggctctgccgtagcgacaggctgtcactggggcaggtggtcgtgcggggaggcagctgctgttagagatgctcggctctgctctgctggctgggctgcccatgatgggcggttcagggctggggagcttgtacctccccatggaagattcctcccagggctgagcacaggcctctccaggacttggagaggttggaacaaaaggctcccgcgaagctttgagtgggaggggaggagatggaatcttcgatttaaccctcagccgagagctgctgtcttgtgtgcagaagtcctgctaagccagtttttcaacttctgcttcggcctttcattggggatgcatgtagaatctgaaaatggtctggatggcgtctttcatcctgcatgcaattggaggggtggggagaggagggttctagaagcgcgtgggatcacagggcgggagctcccaggagtggaggaatcggcacggggacagaggaatgaccaggggcccccgcgggctggcttgggaaggggtcttgccttctacccaggtatccttccagaaggcatctctggggcctccgtggactcccccactccccacaccccactgtgaccctttggtgagaccggagcatttgcctgtgagaccatcacggccccagaaccccaggcattctggggttgtgagtgacagacgcagccagtggctctgttctcatccccagggcctcggggccgcttagggccttccctgggctccgctggcggtactgtctggtttgggttttcagaggagtcttggcctaagggcttcctgagtccaccatgggagacctgggcctccacctcggggagcctgccctgccctgccctgccctcctctaggtgaaccaggggcagtgccacagctgggctgatcccaggaccccaggctcccctttaggttgggctgaggattgggccacaggagtgggcaccccacttcctggggacagcacccctgtgtccacaggagatgcagggaggggacgtggggagattggggtgcggcagctggcaatggaggccattagagttcaatgggaacaggcaacaggtgggagagagaccgccgcggcttctcagcagcagacctgccttccgggagagtgtccccgtcacgcagctcttcctggggcgggctgccttggcttcctagccctggtcacggcccctcctgactccctgtcgcactcctctggcacctcccttgagttcagtgagtctgtgcccacctaagacaggaaggacagtgtctctgagtctcggctggtcactgccgacgcccccactcagactcagaccccaggacgggtgtagggcagccggggcagggctgggcactgagtttggccagtccttggcccagaaggccctgggtgagtggacggctctggatgtccagggagaaccaggtgttgggggaggggctcagaggaaccatgtttgggggctctggcctcaggtggcagtcagccgagacagacgtgtccccctcctgttgatgggatgggacgctgcagtgtcagcttgatgggcattgtggagaatggggcagccaggaggcaggtggagggggagctatgggccagggaccctgtgggcagccagggctgtagacccggggccatcccctgggcagttggggtgattccttggacgagtttttagggggctcaagtgtctctctccctctcccctctgttcttctagaggcatcccctttctccggggaggaagatgtgagtgacccggacgccttgaggccgctgctgtctctgcagtggaagaacagggcggccagcttccaggccgagaggaagttcaacgcagcggctgcgcgcacggagccctactgcgccatctgcacgctcttctacccctactgccaggtgggcaggcgggcctcacgggtcccagagaaccccaggcaggggcggtgggagagggcgagggaccgggcaccccacacgcctccctctctcacgcagggcagggtgttggccagcaccccgagttgtgagggcttgttcctgacagccgtaggcagagcctggtctctgggttttattggaatgaagcttactaacgtgcccatgtgcaacatgagccatggtggatggggcagagggaggctgcggaggctcggggtcactgccctcagggagcgcccgtgtctggtgggcgctgagatgggccgggtggtgtgggagtgcagtgaaggcccaggtacaccacctgggtggccgggcggggctcccgcaaaccctggcctgtctagctgagctgggcacctggctaaggtcctgtttctggtgctctttccatgctggcctcgcctgtcctctgcacccagatggggagctggcctctgcccacggccatcccaggcatcagcacccagcccagccgttttcctcggatctcttagatccccccttctctcttcccctgggcatgcagcctccccaggacaggacctggccacatgctttgcactcccagctcctagccccatgccaagcatgtccaggcatcagcagagctgccctgggttggggacgtcaccccccaggcctgtgcgccggccgggtctgggtggacagagccagggagagtgctgtgccgagggtggtgagcctgtcttggggctctgctgctgggagctggatttagtgctctggttcctgagacaaacaagacctgacagccgacaccgtctccaggcacttgctgtcctttgtgaggccagagaggctgctgggagccacagggcctggaatgccacttcagacatgcgtcttcctaattccccttgccaggcagagtgtggagactcgttcatcacacaccacccccagcataccccagcgccaggggccacccagcaccaggggccacacaggccagcctgagctctgtgtctggatgcaaccctcatgggaaggtcttcggcgggttggggacagggtcagacagtgtttggggatcctgactttctggaggagtgagaagaggggccgaggtggctctggccatctccccgacctccccctccagagccagggggtgtcgaagcctggggcaggtgccctgagagaggtccgcgccgcccgcccgcctgccccacacatggctctgtcccctgaaggtcgcctctcccctacaggccctacagactgagaaggaggcacccatagcctccctcggagagggctgcccggccacattaccctccaaaagccgtcagaagacccgaccgctcatccctgagatgtgcttcacctctggcggtgagaacacggagccgctgcctgccaactcctacatcggcgacgacgggaccagccccctgatcgcctgcggcaagtgctgcctgcaggtccatgccagtgagtgccactgtggggcccagaggagctgcgccctccttcagggtgttggtgggggtgccggtgggggctccatcctcccctgcggagggccacaccggcccctctccccaggctgcactttcagggccagggcaggggcctcccccggtgacttcctgcaatttctgactttctcatccttcccgttgtggtcccaccatctagagcagggggaaaggctgtggccatggaagggctggatgaccgcatgccaccctggggcaggacagggcctccaccgcccccagcatccagaagatgccagtgcaggcccaggtgctggcctctggtgccagcctctgcggaggaagcctctgctccaaggggcactgggctcatcccaccctgtccctgacacccagaagctcaccctagggccagagcaagaaatgggccaggcaccccgtctctccgcaggctgtgttccctgagaatggctgtctctgccaagcagcctttgggggcaaacatccctgcccttgaccttggcccaggcagggttcctcctcactggccctctggacagttctgccgagtcttctccaaggcctgggaggcgacaggaggaactcaggcagccgctacgcctgtgatttgtggctgtggttgaaactgatggtcacagtgagattgcagcgtggtcagggcgtctgatttatctctgctctcagggacccctccccagtcctgaggctcgaccatggtcacagacaagaaaatggatgtctgtctctttcccacgcacgggggggcggtggcaggaattggactttcagggaaggaggagggctctctggagacgtttaattttctgtgcccctggcagccatagatctgtgtcggtttcctcctggcggtggcctgcctgggggctcgcgttgtctcctggctgggaggctcttcactctgctttgctgggcctgggtttgagatgtgcccccggggcagatgggctccctgggggaagggttgccgagggtcccaggcctgccacagccgggccgccccagccaggctaccccagcagacgcccccacccccagccgtgcccaccaccctgctgctctggaggcagtgaggtccccgcccccagcctcttcagtgggccatcagcactggcagagagccccttccacactgggggcagtgatccccagcagaggcagagccctggggggcaggcggcacccctgccctcgctctgggggcatgattcggccttttgtgccctttccccatttccagacccagggccacatcccacagtgagtctcccttgcggctttggcctttctggacatagcaggaggagctgctgttgggggtgcagacacccaacaaggaggggccctcaagacaccaccaggctgagcgcggcagacccagctggagctcagggtccctgcttcccctcctgcgtcctctttccacacaagtagcttccagacctttctctcgctccacatgcagtggcctggattgaagctcagagggtgggaacagcacgcaccctgaatgctgcagctgcgtgcggaggcctcgtcactccacatacggacactggcccccaagttacccggcccctccccctgagtttcactcggctccccaagtctcacctgccccccagatctcagccagcccccgctgtcttccaggttgctatggcatccgtcccgagctggtcaatgaaggctggacgtgttcccggtgcgcggcccacgcctggactgcggtaactcgctccccgcagcgggggtggtgctctgagaggcctgggccccggccccactccagtggggtgactttggggcgtagtctcccctccgtgggcctgggttccttcacctctgccctgagggggtggaacccaagggattcccacccgtcactttggtggctgctaggttgaaatataagggccgtgggctggggacggttggcagatcaggccccaagcagtgtgtggggagcctgctccgagccctgctcatccagggctgtctggtctccacaggagtgctgcctgtgcaacctgcgaggaggtgcgctgcagatgaccaccgataggaggtgggtggcaccgcgcgttggggctggagggccggaggggagcctgccctgggctgaggctctgcagggtgtgaccccagtgcctaggggttgaccatcacctccacataaccgccctgtgtcatggatggggtggccagggctgaggaggagcatacgcctgcaccgaccttcctgaagttccccaggccctgacccagccgacagccacatcacgcccagcccctctgtgaccagcccaggtcctcagaggcgcacctgaccccgctgcacctgccctcccaggtggatccacgtgatctgtgccatcgcagtccccgaggcgcgcttcctgaacgtgattgagcgccaccctgtggacatcagcgccatccccgagcagcggtggaagctggtaggtccttgcggtcgaggcccaccctgcccgtgcctctagggctgccggccatgctcggctccccacctgcgcgatctgaagcggtctttcctccaagctctgcgtctccatgggggtggtgggcagctttcaggaagccagtgatcccgacttcagcaggtgtgttattttttgaatccttccccgaggtgcaaggtacaaaaatcagaaggcatcaagggtggcagagataagcaggccccgtcaggtgtggccttgggggcatcctctgcagaatcgagcaccccatgcagtttccaccttcccacaaaagcagaggcaccgcacgtgccccgacacaaccgggctgtctgatctttgctgtttttctaataattataacaagcctgggcaacacgatgagaccccatctctataaaaaaaataaaaaacactagctgggcgtggtggcacacacctgtggtcccagctactcgggaggctgaggtgggaggatcgcctgagcccgggatacccaggctgcagtgagctgtgatggcaccattacactgcagcctagacaacagagccaggcactgtctcaaaaaaaaacaaacaattgtaacaatgcttagcgtgagatctgccctcttaagaagcatctgaggttcagtacagcattcaccacgggcccagtggtgggcagcagggctctgcggcccgctcacccgtcctgtataactgacacttcacacgtgctaagcagcagctccctccgcccaccccagcacccagcactctgcttctgtgtgtttgcctgtgttatagaccccacgtgagtgggattgtacagtctttattcttctgcgaccggcttctttcttaagagacagggtctctcactctgttacccaggctggagtgcagtggtgtgatcacagctctctgcagcctcaaactcctgggctcaagcgatcatcccgcctcagcctcctgagtagctgggaccacaagcacgtgccaaaaagttaggttaactcccaatttttttttaaaagatggggtctcactatgttgcccaggctggtttggaactcctggccttgagatcttcctgccttggcctcctgggtagctgggattacaggcgcgagtggtgtctttcatttggcatagtttcctcaaggttcatccacattcattcaacccaaatatggcaggagttccttcttttcctggctcagtgatgtgccaccatgtggatggacgacgttgtgttgatccgggcacccgccgatgtctctgccttcaggctgttgtgggttgcgccgcagcggatgtgggagtgtggttgtggtttggagattctgatgtcatttcctgtggatacagacccagcagtgggcttgctggaccgtcgggcagctctgtttttagcactggaggaaactgctctcccttgcggctggacggactcccatccgcaccccccgggtgcagggctttccccttcccctcgtcctcactcacacctacctttgacttttttgtagcagccgccctagcaggtgcgaggtggtctcgctatggtttgatttgtgttctcctggcggtcagtgacgctgggcatctttgcacagtcctgttggccatctgcatgccgtctttggagaaacgtctgttctgctccttcgcccattccgtgcctgggttgcttggccttttgtggttgagttggaggatctctgctgctccactcttggtgcacattgaggccccccgtagatgcgcgcagccaccttgggcgtagcggggcctcatcgtgggggcttgtgaagcttcctcctgctctcagcaatgatggcccccctttggggaaccccttggagccacagggcagtcaggagtggtcagtgctggccaccagctggctgtgcacttgggacagattcctcgacctctctgtgcctcggccgtcccttctgtgctgtggggttgccacagtccccgccatgcagggttgcagtggtgtgagctgggcccactccctaaagcatggaccaccctgtctgagcactagcagctgctcagggcttgtcaaatctgcagcctcgctcccccaggcccccagtgtcacctactgcatttgatccacacagtgagagcctgtggggtcatcctgcactgtctgttctgcaggtgaggagcctggggcctggaggggcttggccgatcatggcctgggctgcagccctgcagggctgtctgctgcacaccctgtagcccacctgcgcacaaggcacttggggctgtccacgcctgctggaaaatgacactcagctggccctttaaatcagcttcctgcagagcc[137 bp omitted]cccgtctctactgaaaatgcaaaacttagctctgcatggcgggacgtgcctgtgatcccagctactcgggagactaagg[131 bp omitted]tgctggggccgcgtccccactaagggctgtgcatgtggcagcgctgatggggaggacgcatttgtccctgtgcactccggcctctgcacacgtgtctcgtgggcccctggaggctgggcccgcagccagtagcacccagcagcgtcctgcctgcttttcctgcctggtttatcttcccagccgcggacacagtgcctggtgttgacattcaggcttgcgtggaggtggggctggaagcagacagatcagtctggcagggtgggtctgctggggagaccacaagggtgggactgatgccggccacaaagcccgggctcccatgcactggtgcgaggtgcccacgagcccggcgggcttggatgccatgcttggagcccacaggtgctgggccacctgggcagggctgtgcaggcagtcacagaggctcatctggaaggggagccctctttccttgttcgtggagtggagtgtgcagtgggtcacgccggcctggccgggcacggccaggcgattaggaagccggcagcccgcgggtgatgcttccgaggcaccagtgactcagtccacaaacgtgggcgtaaaaggcctcatgattcaggtggagtgatggtgcgatgcgtggtgcagtgataagtcctcctgcccgacgccttatggatcatctgacatttccagaacgcagcctcttcattaccggtgcttgtaacgatgaattaaaaatccttttacacgaggcccgcttgtactgcttaatggggctttgcaaggaggcggcggttaattcctgctcgcccaaccgcccagccaccttcgcgggccacgggcaggctgcaggcatggggcactcactcctggttacccatccgtcagtttgtctccaggacttctccagccaccggctcagggctccaggcagtcctggtgagtcagggggctccggctggccgcccgcctgggccaagttatcaccacgttctcaaggccgtgctgctgagaagcttctcacctaccggctgggcaggttcctggcagcaggcaaaagcaccgggagctccctggaggatctgggaggtctgggaggggcttgggatggggggaggcgcctccagggcagcaggaggggtgggcagttgcaccagctctctccactgcccacagtcctgcctggaggggtagggctcggtcaggagggaggggctctctgctcctcaggggttggggttgtttgcgaaagcaggttggtggacagccactgcgcctcagtgtgtgacaggctgaggacacagcttcatgggtggtacctagcggtgaccacctgcttcctccaggccgtggtgctctgcagacctctgaagcccacccgcgtcgtcctcacagccctgtggcctccgaggaaggacaccgagccgggaacttcgaaccaaacaccagtgcctgggcccttccaggccccccacgggccgtagaccctgactccccggcacacactggcctgggccaggccagcactggatgtgggtcttcaaactgcggctcccaggaagggaggtgacggccaagaacgcctgcccgacctcctgtggccacagcgcgtggcgtgactggacctcgccttagtaggggtggctctgggcaacctcggccccaggcacagctcctgacaaatggtcccatgggtccgggggcacgcttttcacaacgtggagatgcagggtcatgggctgcctgctaccacgaggcggaaggggatggtgctgggcaccagcctgccccggggctgggtttctcctgggcctgggccgaggggtggaggcctgtgggtgacgtgttcaagacggctcagcaaccccacctgacagtgtccaggtggggcctctcccccacccccaggctccccagggagcacagcctccactcctacacactggctactctgccggagggggaggccgtgctggagtgatgcctggcgcgtgttgtgtgatgggagaattgggtatttacagtttaataacgagatctcgatgccgtcgatcggccctgctccaggcccttggcttatctggcttttgaacgtggtttatagagtggtgacggtgccgcttattaaatgcttagctgggcctggcgtgggtgtggcggccgccagggccccggtgctggctcgggcaggtgttgcagcgggagcctcaagggatgaaaggtggctctccggtgctccctcctcaccaaggaggcttctctcagggcttcttattaaaagccgatgtaaaggacctgcgcgatggctcacgcctgtaatcccagcactttaggaggtcaaggcgggaggatcccttgagctcaggagtttgagagcagcctggacaatatagcaagactccacctctacaaaagtcaaaaattagccaggcatgatggttgcacctgtggtcccagctactcaggaggctgaggtgggaggattgcttgagcccaggagttggagaccgcagtgagctatgatcgcgccgtgtgctccagcctgggtgacagagcacccaggctcaaaaaaaaaaagaaaaaatccttcactctaaccattctaaagtgtgccactctatgttttttagtacattctgagttgtgccaactatcacaccgtctaattccagaacagttcatcaccccatgaagaatgggccccattaccagtcgctcccatcccctaccctgtgcccacgagcccacttcctgtgtctgggggtggcctgccctgggggttgcagaacacggggtcacatggtctgcactcacctctgtgtccccagggcacatctctgtcgccacgtggttcctctggctgagcgacaccacgtggggctcttcagtgtctgtcccagcagtcagtgacacgcagggggacgggagaggactccccgggggctgatctgtcccagcagccagtgacatgcaggggggatgggagaggactccccagaggctgagcagcaggaggctgggtcagtgggtctggagggcttggccagggaggctgcgggctctgggctgtggaggggaaccctcactgggcagagcgcagggccactcccgcgatgcctcccttgaaggctgtgccgggaggggccggggactccgttccagggtccctagggaagctcgagccccatgcccctgcctgtgtccccatccccagaaatgcgtgtactgccggaagcggatgaagaaggtgtcaggtgcctgtatccagtgctcctacgagcactgctccacgtccttccacgtgacctgcgcccacgccgcaggcgtgctcatggagccggacgactggccctatgtggtctccatcacctgcctcaagcacaagtcggggggtcacgctgtgagtgcctgcccgcctccttgcccccagcccctggctcccgcccccaccgacacccgcgctgaccgccccccacaccctccgcaccctcccaggtccaactcctgagggccgtgtccctaggccaggtggtcatcaccaagaaccgcaacgggctgtactaccgctgtcgcgtcatcggtgccgcctcgcagacctgctacgaagtgaacttcgacgatggctcctacagcgacaacctgtaccctgagagcatcacggtgagctgtggggtggggcagggggcggggggaggctgggagcacagcgacaacctgtaccctgagagcatcacggtgagctgtgggggtgggcggggggaagctaggagtggcctgactccagatcccttcatggggtccccttgtcctcagggccccaggccccttcaggaaaagcaccgctcactgttcagcagaaagcgacccgcagccagggctctgcaccgccccgctaccccgggcccccgcagccagctttggggcttcaggcagagaacctcacttgccagcgcggagagggtctaaaacccagcgacagcccccagcgtagtgtggccaggacctcacctcccacctcttctccctgcagagtagggactgtgtccagctgggacccccttccgagggggagctggtggagctccggtggactgacggcaacctctacaaggccaagttcatctcctccgtcaccagccacatctaccaggtaagcgggggatctggcagccgcgccatgccttcaccaagctcttcttgtaggtgcggggacaggaggatcacacccctggcccaggtgcctttgcctggggcactggcgggtgtgggccatggttagtgaggcccgcaggacccagctgagccttggctcgcctgcctaagttagaagcacagggcttgtttgttttcaaagctaaaggggcctccactcgggtgacatttccctttgagacaccttctcaatttttcttaacataagttctccctttcaccgttttggagtgtacagctcagtacccctgggtttttttttttttaatcaaattggtagtgagtttcttctcatgactgtggaagaggaattatttaaaagtgtggaatcttagaccgggcacggtggctcacccctgtaatcccaacattttgggaggccgaggcaggtggatcacttgaggtcaggagttcaagaccagcctggccaacatggtgaaaccctgtctctactaaaaatacaaaaattagctgggcttagtgacaggcacctgtagtcccagctgctcgggaggctgaggcaggagaatcgcttgaacccgggaggcagagtttgcagtgagccgagatcacaccactgcactccacactccagcctgggtgacagagcgagactcagcctcaaaaaattaattaattaattaaatgaaataaaagcgtggaattttaggaggagagctgcccatatcccagcagctagaagcgtcgctcccaagcctggtgccgcacttcccttgagctcccctggctcgaggctcccgggaggaggcgacagcttgtctcttccagtcacatctgccccatttgaggagtggaaacgaagcctcactcagagtcacctcgggtcacgcggcgggtcagtcggtgacgtcctggccttagctcgcaccccgagccccaagttctttgtaaacatcggagttcagctctttaccacgtcggttaaggtgaaaaccctaacccctgcgatggtcccgaggccgcattaaggaaaggtcccgcccgcatctcccgccagacctgaatgaactgaaatgatcgagtgtcactgagtgcccaggaccacccctaccccccgccgtgcaggccggccccgcccggtcaccactctcggacctgtcactgagcatccaggacccccacccccggccgtgcaggccgaccccgcccagtcaccactctcaacctgtcactgagcatccaggaccgccttgccatgcaggccggccccgcccggtcactgctctcggacctgtcactgagcatccaggaccccccccgctccgccgtgcaggccggccccgcccagtcaccactctcgacctgtcactgagcatccaggacctccttgccatgcaggctggccccacccggtcaccactctcggaccttgcagggtcttccctgctccttgagaagggggtggtttcggggacaagccatccccatggccagccctgtgggagctaccaccaatctccagacactgtcacttctgctcagctccagccttccctggggggaggctcaggcagctccttggacttcctgattgtgttaggcttagaccaagggcaaggtcgatttgcaccccttagcccatcccaggcagcagcaaaagagaataatccctgctcagctcacctggcag[132 bp omitted]gagaccccccccccccccacaatctctacaaaaaattttaaaaattagctgggcatggtagtgtgcgcgtgtagtctcagctactcgggatgctgaggtgggaggatcgcttgaacccaggaggtcgaggatgcagtgagctgtaattgagccactgtactccagcttgggtgacactgagaccctgtctccaaaaaaaaaaaaaaaaaaaaaaacaaaaactctgctgggaagcattctggtgcatctagtacacggcaggatgggtggggtctgtgtgacagtgacaacaccctccgcctgccccgggagcctcagagtctggcccaggcaggtcggactggactccgaggaggggaggttgagccaggacctctagaacaccatggaagtttactccagagatcaggctgagcatgtgccagtctctctccctccctcaagaaacctatggagatgatagaaaacacacaaatagataaatagccatttataacgtacacagagcacaactgtggtggaaaatgacaagggagactcagggtgggtcttgacaacatcccacagaagaggcgctgacgcagcccccaccctggtggcgaaggaagtgctcccaggatcattgtcatgtcaccagagcccaggcagggccagcgtcaggggagctcacctcaaggaagccgagctaatgagacagtcagaaatgagatgatgccagccaggcgcgggggctcatgctgtgatcgcagcactgtgggaggctgaggtgggcagagcgcttgagcacaggggttcgagaccagcctgggcaacgcagcaaaaccctgtctctacaaaaaaacaaaattagctgggcatggtggcacgcacctttagtcccagctacttgggaagctgaggtgggaggatcacttgagcctgggaggttgaggattcagtgatccaagatcgcgccactgcactccaacccgggtgatgaaacaaagccctgtctcaaaaaaaaaaaaaaaaaaaagtcacatttccagagtgctcggggcgggggggcagaggctgtggaatcaggaatgggtggtatcggaagccagcaagccaccgtggagtgcgcgcctgcctgcgaggtggcggcaggacctcgatcacacaatcatgcaaacgcccgctgtgtggtggccaaggagatggggctggagctgcctgccccgaggccaagggcctggtcagcggggcgggtggctggggtgggcccaggtgacagcgaggccgagtggctgagacccccacatgccaaggccccaagagcctccccgcctgtccggaacacttggaacatgtttccctcgcacgtgacccctcgagatgcttctgagacgtgccgggcaagacgtcaccacagggagcccgggccgaggcgcacgcctctgatttcctgtagctgcaagtatatccagttttctcaaaatgttaaaaagcaaacgccgccttcagaactcgccctgtggagactcatagtgaaagcacgttccagggaggccactgggaggaaatcagcctgagtctccagtcagcccccagttcccaaatgacccaggcacagaagtttccctggagcccacttggacccggcagtgtgagcgccatcctcctaggcggttctgtgctcctgagaatctggggcggatctctgcagtcttcctgacccagaaacctgagccagtttccactgagtttctagaacgcgccttcccctcctggcaaggctgcttctgtgcctgactgaatcactgtgtgccacgcctgccagaagccgagaggccgagtcggggccggggagctggggaaaggcagcaggtgggccctgggactcctgcagtgggagctctaaaacccgctgctgcccgtggcaaagcggagcctccaaaacccgctgctgcccttggcaaagcggagcctccaaaacccgctgctgcccgtggcaaagcggagcctggccacgccgggggtggaaatcgctttccggggtgctggggctccgacactaggactccttcacccagactctcctcaccggacagacgctgggaaggggccttctcccggtggctttcctctacaaatgagatgggtaggacggggcagagggtggcacccatgtccttggttcccagcaggctcctccacacatccccgagagatgtgtgctgtcgtcccaggacacggcccagaggcaaccggccatctgagagtccacactgggcactcccagccctgcttctcccgccgcctgcgccggccaagaggcatgtggaacccacagcagacacttgctccagggcctacgtctgtctccatccccacccatccctggaggagtcacagggaccggcaggcttggctgccccaaggcagggtctgtgctcccttggagagggaggtgctgcgatcccgggcccccccgctgcacactacgtggggcgtctagccccagacacacttccgcgatggtcttactgtgtgacttttatacacttccgtcatggtcttagtgtgtgacttttgtacgcttctgtgacagtcttatgtgtgcattttgttcattttgagacggggtcttgatctgtcacccagcctggagtgcagtgacataattagagctcactacagcctccacctcagcctcctgggtagctgggaccacaggcacatgccaccatgcctggcttgttttgagtttttaaatgtgaaaagcgagccctctgatatgggaaccttctccccctggagcagaacggcagtcaggcccagggagtgaccccagcacctttcctggcttgggaacacggcgcccatcgcagttatgaggtgggcctggagacacgcccctccctggcacgcccttcatgggacagtgttgtgttgccagagggcccctgagagagtctccgcgagcctgagctggcaccaagcttaacgaggaggaagcggggtgctcccagtgcccctcaccagtcaggcatctgccacctggaacaaggcaccagctggggaggctggaagggggtgatttttctctgagttgaagggaagaggtgactgagctgttttcagagggccacacataagccagggaccctgtccttcaccttctggttgggggctcctgagctcaggcccctgagtccgcctgtccggcctcccctgcctcccaggccctgttagggcactgcgcctcctgcctggctctgtgtccaccagtgactctgtcaccttgtcctggggctgtgtcttcatggagacagatgtcttttgagctgggaggaggtgaggggtgagtgttctgtctccatgtggaagctgcggggccctgcctctgccccaggctgtcccgtcctccgtcatccttgccccgtggtacgggaccctcagcctgatccttgtttgctgcaggcggtgtcagaggtggacatgagcttcagcttggctgcatgtggcctctagcgggccccatgcacccaagggggctggcctcccagctcttgaggccgtggcctgcctggagcacctgccatcctggcagtgccaggcccctgagagccacatccccctgcaggtggagtttgaggacgggtcccagctgacggtgaagcgtggggacatcttcaccctggaggaggagctgcccaagagggtccgctctcggctggtgagtgcgcgaggctggcctggtggctccgggtgactcagggagcccgtctgggacgaggcagggcacagactgcgtcttccaatggcgtggaccaccccctcctcttgcacctctgctggaagggggtcccggccgccccagcacagctggtccatgggctcctggcaggagacccttcctttgccttgactcctggtgccgcagctcctgggcgatgccgttaatgtggggagggagggttggagaagccccgcccctccccttatcacgaatgcagaacagaccctcccagccccctgtgccctgcaggacccgcgctgccccaccctgcacagggcggcctctgaaccatcacaggttttggggtacaggcgaagtacgggcaccccagttgtcggcttaaaaaagcttttcctgaggtttttccttattaaacgggagcctgagtcctggaggcagcggaggcagctccagctttcgctcccccagccctcatgggcttcctttattctctttctaatcgagaggcgagaggcgaggtgttgaggggcagagcccgtgggggaggttcctggtcctggccacagctgctcagccgcagaggggtccctcggaaaacagatgggagctgccagatggacggtcccagccccagccagggtgcccaccccactagggggccagaggctggggccgagtgcagggcccctctgctggcaggatcaggggtttacaaacacgaaaacaggagcctgctgagcagcccccacagcaatcagggctctgtgtccagccagctcctctcagaggccatagacagtggctggggccgcacagagtgtctccaccgtgctaaccactgtgcttccgctctcccgcagtcactgagcacgggggcaccgcaggagcccgccttctcgggggaggaggccaaggccgccaagcgcccgcgtgtgggcaccccgcttgccacggaggactccgggcggagccaggactacgtggccttcgtggagagcctcctgcaggtgcagggccggcccggagcccccttctaggacagctggccgctcaggcgaccctcagcccggcggggaggccatggcatgccccgggcgttcgcttgctgtgaattcctgtcctcgtgtccccgacccccgagaggccacctccaagccgcgggtgccccctagggcgacaggagccagcgggacgccgcacgcggccccagactcagggagcagggccaggcgggctcgggggccggccaggggagcaccccactcaactactcagaattttaaaccatgtaagctctcttcttctcgaaaaggtgctactgcaatgccctactgagcaacctttgagattgtcacttctgtacataaaccacctttgtgaggctctttctataaatacatattgtttaaaaaaaagcaagaaaaaaaggaaaacaaaggaaaatatccccaaagttgttttctagatttgtggctttaagaaaaacaaaacaaaacaaacacattgtttttctcagaaccaggattctctgagaggtcagagcatctcgctgtttttttgttgttgttttaaaatattatgatttggctacagaccaggcagggaaagagacccggtaattggagggtgagcctcggggggggggcaggacgccccggtttcggcacagcccggtcactcacggcctcgctctcgcctcaccccggctcctgggctttgatggtctggtgccagtgcctgtgcccactctgtgcctgctgggaggaggcccaggctctctggtggccgcccctgtgcacctggccaggggaagcccgggggtctggggcctccctccgtctgcgcccacctttgcagaataaactctctcctggggtttgtctatctttgtttctctcacctgagagaaacgcaggtgttccagaggcttccttgcagacaaagcacccctgcacctcctatggctcaggatgagggaggcccccaggcccttctggttggtagtgagtgtggacagcttcccagctcttcgggtacaaccctgagcaggtcgggggacacagggccgaggcaggccttcggggcccctttcgcctgcttccgggcagggacgaggcctggtgtcctcgctccacccacccacgctgctgtcacctgaggggaatctgcttcttaggagtgggttgagctgatagagaaaaaacggccttcagcccaggctgggaagcgccttctccaggtgcctctccctcaccagctctgcacccctctggggagccttccccaccttagctgtctcctgccccagggagggatggaggagataatttgcttatattaaaaacaaaaaatggctgaggcaggagtttgggaccagcctgggctatatagcaagaccccatcactacaaattttttacaaattagctaggtgtggtggtgcgcacctgtggtcccagctactcgggaggctgtggtgggaggattgcttgagtccaggaggttgaggctgcagtcagctcagattgcaccactgcactccagcctgggcaacagagcgagaccctgtctccaaaaaaaaaaaaaagcaatgtttatattataaaagagtgtcctaacagtccccgggctagagaggactaaggaaaacagagagagtgttacgcaggagcaagcctttcatttccttggtgggggaggggggcggttgccctggagagggccggggtcggggaggttggggggtgtcagccaaaacgtggaggtgtccctctgcacgcagccctcgcccggcgtggcgctgacactgtattcttatgttgtttgaaaatgctatttatattgtaaagaagcgggcgggtgcccctgctgcccttgtcccttgggggtcacacccatcccctggtgggctcctgggcggcctgcgcagatgggccacagaagggcaggccggagctgcacactctccccacgaaggtatctctgtgtcttactctgtgcaaagacgcggcaaaacccagtgccctggtttttccccacccgagatgaaggatacgctgtattttttgcctaatgtccctgcctctaggttcataatgaattaaaggttcatgaacgctgcgaaaccccgttccatgccccggcaagtgtcttcatttctgagcctgtgctagggggactgatgttggggcctccctggggtggggctgcctgcgccccgttctcccgggagaaggtttgcttccagagctggatgtccctcccctcccactctccagggtccccaacacacccccacacacccaggggcagctgtcatgcccctcatgctgtggccaggctgggtggctggggcagcggaccccatgattccccctcagttctctggaggcctggccctggcctcactcgtcccagccagcagctgccctgtccctgtcccccatccggttctggttacatctgagccccgagagcattgcttgtggtggtggtggctggcagacgtgctaggcgctggggctcacggccctggatggccactgggacccagcagtcctggcctgggtcactcagtgcccagccccaccaggcctggagtcggcagaggggacacgggagacctgagcctccctcagggaggtgaccctcctgtgcctggtgtgcggcaagaacatgaagaggcccctgtggctggagcagagggaggcaggggagagggggaggaggggaggcagggtgtgcaggcccttgtgggtctcgggaaggacttgggctttgaccctgagggaggtgggagccatggaggggtgtgggcaggggagggatgggccctgactcaggtgctcacaggcgccctctggtgattgctgtggggaggagacggggtaagggcagaagctagggaccagggcaggggtcaggtgtagtgagaagtgggtggattctggatgcattttcagtgcagagccaataggattcgcagatcacccgagcccctggaaggaggcgttgagctgggagggggttggatttgaacaccagacgtccaggtgaaggtgctgggtctggggaggccgccccaaggcaggtggtcaggggccgtcagctggcaggtgttggaactagaggatgaagtcacctgcagggagtgggtggaggtggggtgggacccaggactgggccctgggtgtctgtggtgggacgggggctgggacacccggagaaacccaggcccagcagccagggctcggggggacgcggccaggccatccctccctgggccccggcgttccctctgcagaaggagtgtccacctgcctgctgtgccgagggcttgtgtcctgaacagagggtgcccttgacaaaaaagcttcatccacctactgcccccagcaccgactctcctttctggggccctctcgcctccagcatcctctcaacaccaccaggactcagttcccctgtgtgctgcaggtggggaggagggatccagggtggggtgaagcccgtggccacaggaggcttggatgctccacctgctgcgatttcccgacaaagactgtgtccctcttttctccatctcgaaagccttccctgtgtgcggggacagacacagcctgaaaccaaagcctctggggtgcccccccgcccgccctaggccctgtgaggtcagcgtccctgggcctccccaagctggcagaggggccgtggcaggagcaggtggtgcctgcagcgtcctttccattgttctccaaaacgctctaaaacgggaaggctatttgggacaggctgttgctgtctgccgagcagagtaaagatgagtggataggtccccaaaagtgtcaccgtgcggagccgatgaggtctgcactcgggccggggtgggtgccccgatgccgaggtctcgtatctcggggcagtgtgtgagactccgtaatcagcacctgagtttggttcatttattccagctgcaatatttttatgcaacctctgtgccaggctctggggacactgctgaggaaaagggagaaaaaaacaaaaatacatctttaatgcatgctctgaaagacaagaacggggtcagagatggagggtaagtggtggtcggtcacagaccaccagaagggtgtcagtggacaccctttttattaaagagggactcttaaacagatatgaccccccgatgggacggcagatcagagaatcaggctgtgggtacattgtgttgagagcaggcaccttctagggcaaggcctggcaacctacagccctccgaccaaatgcagcccgccacctgtttttgtcaataaagttttgttggcacatggacatgcccattcatttacatatgacagctggcgccccgacaacagcagacctgaagagtcactgcagagcccacctggcctgcaaagcccaatgtatttagaatctggccctttatgggaaagaatgtgctcagccctgacttagaagaagtgggtggtggcagcctccaccctttctctatgcctgcaacaaaatgttctcccatagggacagcccctcagtgcccaggtccaccttggctctcaaaggcttccagttagatggacagtgggcagccaactgcccccgctgccacccgcaggagcgggtggaaaaaggaggctttgaccagggactttgattcatctgtccatctgtccgacccactgggggtgctctgccctctacccttgggccacctgctgcccaagtgctggggtcggggagagcctgacacactcagcctccgacccctgcagctgccccccaccaaccccaccattcacggattgggctccctccccttctgcaatggagagttctggctcccactccaccacggtcaagattcacggctcccatgacggtgctaagatcccgatgtgtctccctctctccctgtggccaccgccccgactcctcccacaacctcaaattgtcccctggccccatgaggcagctctggaactcaagagtcacagcctggtcatgatcatcagggagagaagctcccagggactcccagggccccagagacgaggcacagaacacaaggaagctgggggacacgcctggggccttggcaccagcccggggagggttatttacggattagatttactcagcgctgctgctctgttaatggagaatataaaaattatttgctgctgcaggcagtgtgaggggtgacagcagccaggaggcgggcggaagagtgggtggctcagggcatccgtgcctcccagctaactcggtgacagggacaaatgcctcccttccctgcagcttccagacggaggagggggtccttgtggccacgacagcctccacccccaccagccccagcagctgctttagaaacacaaagccagccatgtacggtggctcacgcctataatcccagcactttgggaggctgaggtgggcggatcacctgagttcaggagtttgagaccagcctgggcaacatggagaaaccccgtttctactaaaaatacaaaaaattagccaggcatggtggtgagtgcctgtaatcccagctactcgggaggctgaggcaggagaatcactagaagccaggaggcagaggttgcagtgagccaagcgcgtgccatttcactccagcctggacaacaagagcaagactccatctcaaaaaaaaaaaaaaaaaaaatagaaaaaaagaaacacaaagcccaaagtatgggtgccaaacgggaagtttgaaaagagtctctgtgtcccccaccccttcccagggcccctgctggttccagaacatctgttgccctctcacccccgtactcatcagagtgctgcaaactggggagcttcaacagagaattatcctctcccagccctggaggccagaagtctgagatcaaggtgtcagcagggccacgccccctcccaagagtccagggggatccttccccacctcttccagcttctggtggccccaggtgttcctgggcttgtggccaaatcactgcagtctctgcctctggggttacacacccgtctcctcctcttctccatgtctgctgtgtgtgtctaatataaggacacttgtaatgggacttagggtccacccacatagtccaggatgatctccaaatctcaagatccttaattacatctgcacaggcactcttcaaggaaaaggtcacagcccagggttctggagaagaagatgtggacagatctttttgggggccattagtcaagccaccaccgcaatgtctgtttccccatcacagatcaatagccccatccctaattgcctggtcctgtgactgccacctcccacctcccctgagagggtaaggatatggtcttggtccccaggaagtggcagggggttctgtgagtcctggtgttggtggaagtcaggctctggaaggaccccggaggcgaaggctctggagggaggacccgacggaaggacaggcatgaacttggcatgtggattccccatgggtgggtctgagagccatggaggatgatgtagcaactagtacagatggcccaggacttagcccagggtggtcatggctgtctcccacactcaccaaccgtgatcttatgtccagagttggttccttctggtgggtgcat[136 bp omitted]cccatctctgctaaaaaatacaaaaaaaattagccaggtgtggtggcaggcgcctgtagtcccagctgctcgggaggctgaggcaggagaatggtgtgaacctgggaggtggatcttgcagtaagccgagatcgcaccactgcactccagcctgggcgacagagcaagactgtgtctcaaaaaaaataataaaattaaaaaatgttaaaataagaatgaagccgcggaccttcacagtgagtgttacagctcttaaaggtgtcttggacccaaagagtgaggagcaagatttattgtgaagagcaaaagaacaaagcttccacagcgtggaaggggacccgagtgggttgccgctgctgcctgggctggccaattttttcccttatttgtccctgcccatgtcctgctgattggtccattttacagagtgctgattgatccattttacagagtgctgattggtgcattttacaaacctctagctacagagcgctgattggtgcatttttacagagtgctgattggtgcattttacaaacctcttgtaagacagaaaagttctccaagttcccactcaacccaggaagtccagctgacttcatctctcaatcccccatctaaacaggacaccccaactgctgttgggaattgggcgatgaccgctctagctacttcctgctggataggggcgaagaaggggccctgcagttgtggtgtcctccagaggggaactctttaggccagtgaaagggccagcaggttggtccaggggtcctcagtagaagttgttagttgagctcatttggggttccatttgtaagatcatctgtagcttgatggcctcaatcctagaggaaacaaatttgacaaggaggttaaaaatacagggcctgaaggcaagtaatagcaagatggctgtcacgggacctagaaaggggaaaagccatgtcgcccaattccagaggttgttataagagtttgaaaggcattgtctgatttcagaagccttttcctgtaaacgccaggcggcgtctcctattatccctgactgattagcggaaaaacaatgctcttcccctaagaaggtgcaaaatcctcctttctcagcagtgaggaggtctagaccttgacggttttggagtcactgatgccaaagagtctatttgggattgtagagtaaggatagattttgttatttcttgcaaactgtctgagaaatcctttgagagtgtgtggtagtaggctagtgaagtggacaaacctgctattctgattcctgtagcagtggccattcctaaccctgtaagtaggggtattagttgtatggctctgtgctgatggagttgagctttgaggggcactgatagggtctgatttccacaagattagaagttaggataatacatgttacactgttgttaacttttagcaaactttacttttgttgaaaaccttgtaagtctgggatttcaattattctttgctattaataagacctcgttcagtccatattaacttagaattggtatagatggctccttcctgattctgtaagtactttaaggtttggctgagtgcaaacagctctcacgtttgagcagaccaattattaggcaattttaatacccattgtatctttttcccttaatcaccggagaggaaccatctattgtcctgtcctgaagggagtaccttctaggtctggtcagacctttgtatggtaattaggatttagatcccctattaggaaacctgctgggttaaggatttttgataggaaagctacaggttgtcagtggcctcagtgctttcaggctacgcccctgtttacgctgacaacaaggtggtattggagtgttacagggtcatggagaagacctccaattaacaattgtaggttttaaatttacccaggcttttaaaggcatagggtacactgtttttttctttactacttctatctctttctttctctctttccttctctctttgactttctgtctctctctctctttctctctctctctgactccctctttgtctctgtctcttcctctctttctctctttccttctttctttgactttctgtctttcccctctctctctctctctttctctctttgactttctgtctctctctttctgtctctctctgactccctctttgtctctgtctcttcctctctttctctctttccttctttctttgactttctgtctttcccctctctctctttctttctttctttgactttctgtctctctctctttcctctctgctggtctttccctgcctctccttcccctttttgatagcttcagcagtgtaagactgccacctccttggggtttttgcactgcatgcaatagctccatgatttccttgtggtatttaatgggggttcccccagaggttaggaactccttttctttccatattgcagcatgggcatgtaggattagataaacatactcgctatctgtatacacgttctttttccctttcccagttctaaggctcagataagtgccactagttctgctaactgagcgctggtccttgggggaagaggcttactttcaagtactgttacataactatggcataacctgcccttcatatcccattctccacaagtgaacttccattggtatatggattaaggtcaggattagctaagcggacttctaagagatcctctcaggcggcctaagtctggactataatttgttggcagtcatgcttgattggtttcccatcctctgggagaaaagtggcaggattgaggggtgcacacatgcgtatttgaaggaccattccctcaagtaacacctggtatctaagcaggcggttgtctaatagccataaacttcctttggcacctagtatgccatttacatcatgagtagtctggacagtgagatcctttccttatattattttgatagcttctgatactaagatggccatcgccgcaactacctgtaagcagtgaggccaggcttttgctactacgtcaatttccttaggtacaccactagttgtagggttgtctcacgagtctgagtaatgactccaagagctattcctgctctctgtgtgacgtataaagagaggtttgttcctgtgggaaggcttaaggctggagcttgtagtagggcctgctttaaggttttgaaggctgtttctgcctctggttcccattctactagatgagtatttgccctctgggtctccattctactagatgagtatttgccctctgggtctccttagagtgtatctcgctgtatctggggatccatagtcggcaaaagccagtgattccaaggaacccccacaactgttttaatgtcttagggcgaggataagccagtataggctgtattcattccttgctgagggccctggttcctctggccaagattaggcctagatatttgacttgtaggcagagctgggcctttgatttagacatcttgtacccttgattagctagaaaattcaagagatcgagagtagtctgctggcatgagtcttccaaactggtagccaaaagtaaatcatccacatattgaaggaccagagtgcctggacttaagaagtggcctaaatcttgggccagtacctgaccaaacagatgagggctatccctaaacccttggggcaagaccttccatgtaagttgggacctgtggtctgtgggatcctcaaaagcaaagagaaactgggagtcagagtgcaggggaatacagaagaagacatccttgaggtccagaacagtgaaccattctgcttcctctggtattcaagagagcagggtataggggttgggtacaactggatatagaggaattactgcctcattgattagtctaagatcttgcactagcctccactgaccatttggtttttgtactcctagaattggggtgttgcagggactactgcattttcttagtaagccttgagcttttaaatgtctgacagtatcctgtaatcctttatgagcttcaggccctaagggatattgcctttgataaggaaaattgatgggatcttttagcctgatttggatggggcgggcattttttgcccttccaaattgtccttccaatgcccagacttcagggttgattccctcctcaagtaggggacaacaaatgggtaatttgttccccatattcaagtaaataatagctccagctttggctaatatgtccctccctaataagggtgtgggactttcaggcataacaagaaaggcatgtgaatagagcaaagtctcccaattacaactgaggaggtgggagaaatacctggttacaggctgtcccaggattcctcggatggtaatggaccttgaggacagctgtctggggcaggagattaacactgagaaggctgcaccagtatccaggaggaagtcaatttcctggccctcattggttaatcatacccggggctcagtgagagtgatgacatgagctggcgcttgccccaggcaccctcaatcctgttgttggatcatctggttgggggcttctggcccacagagcctttgccctctggggcagtgcaccttccagtgattgcctcagcatagtggacatgggctagggggcagcttgtttctcattggacaatcttttttaaagtgtccttgcaaaccacactgataacaagccctactaggtgattggcctgttccattttctgtcctctctgaaccaccaaggtttgtttgtctgagggccatgactaaggctgtggccttcctctgatctcgcttttccttttcggcctgtttctcttggtccctattatagaacaccgaggttgcccggtttaacaatgcatccagattttgttcagggcccagggctcacttttggagctttctcctgatatcttcactgattgggtaataaagttatgtttgaggatcagttgaccctcgagagagtcaggtgacaggggagtatattttcttaaggcctcctatagccactcgaggaaggcggtaggattttcttcctttccctgagttgtggtggacatcattgaataattcatggggtttttcctaattctccttagtccttctagaacacaggtcaacagatgtttgcgactccagtccccatgatctgagtcgaggtcccagtggggatccatactggggatggcttgctgaccagtagggaatttgtccctttcttcagctgtcatcctatcatttacttgattaagataaaaggtatctccaaactcttgggctgcagctaaagctccattcttttcattaaagaccagggtttgatctaacaatagcatgacatctctccaagtgaggtcaaaggtttgccctagaccctataggacatctgtatacctatcaggatcatctgaaaacttccccaggtctaccttgatctgctttaaatcgagagggagaagggacatgtacccagattgggccaaaatccctacccctatagcttgaaggggacataaatgatagcccagggggttttgtggtcccttggagatttctttgcttgtttccttctgggtgggggagattagacgaggcttatccttaataggaatgggagctgtaggaaggctaggatatagaggtaagctgagagctcctcctgtgggatgtaaattgcaagctttgcatagttgtggattctccttcaatgaaaagaaagcttggacataaggtatttcactccatttgccttccctcttacagaaaaagtcaagctgcatgatagtattgtaatttatacttccttcaggtggccatttttccccatcagagagagaatattggggcaaggccatagtgcagaaaaaaaaaatgagccacctctttttcagggtttctgggtcaaattggtcccagtggcttaggatgcatttcaaggttgagcctgttgatgcctgagtgtttcccatgtgaaagaaaaactgctcgcagttttggtttgttttcccccctcccccacccaagaacctgcaacagtccctggaccctgctgatcgtaatagttgcgctcaccgaagcagcagcagaaacactagttttcctcctagaccacaaagaggactgaggaaggtcagatttagtggcccttactgatgcattctcggaaacatgcatccttgcctttcctcttagaccacaaagaagactgagaaaaaacagatttagtggcccttaccaacacattctcgaagacctgttagagtcctaagcattttctcctgttagtattgggaccttacccttgttctataaagatgttatgtctcaaaatggagtgaagggccataccctgagggagggaagggatctctagagtgatgccttttgtcctcacttctcatcatgtgaataggaaggatatcatttctgaggctccccatatcctagctttgggaatagcctttgttaggcctgctagtctgaggagggatcctaaaattccagatagtctccccactgacagggctttgggcaaagattgtctttctgattggtgagcccagatgcctaaagaaaggaacagagtcctgaaatgtatactagaagtcgttcttataggagaaactagaaaagcaccagagacagggagtggtttttagaaacaggactagcctcggagaggagaggtgggaggaagtatgtctgacaggcattaggacccaggaggcaagggtcaggatagataggataaatgggcaagtctcgcttgggtgacgtgactttgagagttccgctcatggctgcagggtcaaccaactttttgtcagggccctggagctaaatggctttcctctctgttgacacttggctcagtccggaagtacaggaaaagtggaagctggttccaggcaaaccaacgctcccaactccaaagagttggggattgttagagagccctttcccagaaagcccgacaccagtgtctttagtctggtggccacgctagttgcttttaactggccgacaagtgcccggtgtttagcccctgaattctaaggaaaaataggacagaatagcaagcaaaatgggtccgatggtactcaccaaaaggcgatatcccagacaagcccccaagatgtgtccagagttggttccttccagtgggttcgtggtctcgctgacttcaagaatgaagccgcggaccttcgtggtgagtgttacagctcttaaaggtggcacggacccaaagagtgagcagcagcaagatttattatgaagaccaaaagaacaaagcttccacagcgtggaaggggacccgagcgggttgctgctgctggctggggcggccagcttttattcccttatttgtccctgcccatgtcctgctgattggtccattttacagagtgctgattggtccattttacagagcactgattggtgcattttacaaacctcttgtaagacagaaaagttctccaagtccccgctcgacccaggaagtccagttggcctcacctctcagtcttatcaattctgccagctgctactgagcccttgcactgtgctagtttttcccaagcccacacacacactggggagccagacactgaggatacagcaagttcttgccccacaaagcccatgccctttagaggagacagatgccagcatcaacattaccaggtgttaagaaagtacctgggaatagtctgagtccttcaaaaagttaaacacagaccaggcttggtggctcatgcctataatcccagcactttaggagtccgaggcgggtggatcacctgaggtcaggagttcatgaccagcctggccaacatggtaaaactccatctctactaaaaatacaaaaattagctgggggtggtggtgagctcctgttatcccagctactcgggaggctgaggcaggagaatcaattgaacccaggagggttgcagtgagctgagaccgcaccattgcactccagcctgggcgacaagagtgaaactccatttcaaataaaaagttaaacacagagtcactgtatgacccaggaatctgacttccaggatacaccaaaagaattggaagcagagactcagatgtttgcacaccatggtcatagcaacatgattcacagtggccaaaaggtggaaacaatccaagtgtctgttgtttgatggatgggtaaacacaatgtgatccatccatacaatggaatatcactcagccattaaaaggaatgggggtctgacacaggctacagtagtgtggatgaaccttggcatcatgctcagtgaaagaagccagacacaaaaggccacacagtgtgtgatcccatatctatgaaatgtccaggacaggtcaatctacagagacaggaaggggattgtaggttgccagcagctggggccaggggaatgaggagtggctatttaatgggcatagggtcttctttgggggtatttgggaattaaagagaattggtgactgcacagcactgagtgtgtcaaatgtcactgaattgttcactttcaaatggctaactttatgtgaatctcacctcaatgaaaaagaaatacgggaaggatagacaagaaactaaggatgttggttacctacaggggcaggtgggaaattatttaaaagaattagggcagtaggcaaggtggctcatgcctgtaatctcagcactttaggaggccaaggtgggaggattgcttgaggccaggatttcgagaccagtctaggcaacatagcaggaccctatctctgaaaaaaaaattgtttttaattagccagacgtggtggtgcacacctgtagtcccagctactcaggaagctgaggtagggggatcatttgagcctaggaggtcagggatgcaatgactcgtgattgtgctactgcactccagcctgtgtgacagagccagatcccatctcttaaaaaaaaaaaaaaaaaaaaaaaaggctaggtgcggaagcttatgcctgtaatcccagcactttgggggcca[133 bp omitted]gaggcaggagaatggcgtgaacccgggaggcggagcttgcagtgagccgagatcgcgccactgcactccagcctgggtaacagagggagactctgttgcaaaaaaggaaaagaaaaaaaaaaaagaggctggaagtggtatgggaaaaagagtagcaggaatgaagagggagtgcccactctctgagaaccatttggtatagctctgactgaaaaatcatagtcatgttatacacactttaaaagataactgattaaaatcaaggatatgatgtgtactccaaatggaaaacaaatagtaaaatataaactcagctgcaccacaaatgaaaatcaaccacactgaagagccaggggaagaatggagttgatctcagtaaatttgggaaacaatgtttccactggatactgttaggctaaaaatgaaaatacctatacaccaacactatactctagttcaaaaatctagttctcatggcttagccatctgtacctactatatgtgaatattgcaattgagcaaatgagtgaattaattgtagatgagctaggtttctctctgtcagcgaaaaaagttacgtcaagggtaaaggaagcggctagaatgaacattgtgctggttggaatcagaagtgtcagtataggctgggcgcagtggctcatgcctgtaatcccagcactttgggaggccaaggtgggtggatcatgacgtcaggagatcgagaccatcctggctaacacagtgaaaccctgtctctactaaaaacaaaaaaaaaattagctgggcgtggttgtgggcgcctgtagtcccagctactcgggaggctgaggcaggaaaatggcatgaacccaggaggcagagcttgcagtgagccgagattgcgccactgcactccagcctgggtgacatagcgagactccgtctcaaaaaaaaaaaaaaaaagtgtcagtatcaatccatgattttctaatatatatatatagacagatgttatagaaatatatagtcagtacatatagatgcagaaataaatatgtaagtatatatatttatattatgaatacaggtgaaagggctcaaacttgtaatcccagctatttgggagaccagggtggcttggggagaatcgcttgaggctaggagttcaagaccagcctggacaacatagcacagccccatccctacaaaaagaaaaatgttaagaagaaataaataaagatgtgtgtacacatggctaatctgataccccaatagcagtgagcatactagcaccccgatctaaataccattctccaataaaaggaaccaggggaggaatcactgattttatgactgggacagagaaaacacaagacaaggtacaggcacataccgctgtgcccagctaattttttattttttttgtagagataggggtctcactttgtcgcccaggctggtcttaaagtcctgggctcaagcgatcctcccgccttggcctcccaaagttggccatacccagcctacatgaatgattcgatgggggtctgggctcggtgactcatgcctgtaatgccagcactgtgggaggctgaggtgggcagatcacctgaggtcaggagttcgaaaccagcctggccaacatcgcaaaaacccatctctactaaaaatacaaaaattagctgggcgtggtggtgggcacctgtaatccaagctactcgggaggctgaggcaggagaatcacatgaacccaggaggtgagccgagatcatgccactacactctagcctgagcaatacagcaagactccatctcaacaacaaaaaaaaaaaaaaaaaagagagagagagagagagaaagaaaaacagaaaacacaagataaacctgaagcatcttgtgttcccagaaaataaggaaatgctcaaaaaagggtatagatatatagaaaggacaccagacccaaccgaagcagctcccagtggctgaagctgaaacaatttgaacaataaaattagtgacagtgtgggattatcacctagagaataaaataaatatccaaactgctataagtaattgaataaatacctaaatggagggagaagggacagatcttccttacagatgagtcacattacacgtaagagggagaagtaatggcttagtccctttgtgccactacaagagaatatcatggactgggtaatttacaaagatcatagatttatttctcgtggttctggaggctggaaagtccaagatcaaggctccagcctctggtgaaggctgctctcagcttccagaatgatgtcttgaatgccaccttctcacatgtcagaaggcaggatgggaaaggagtcaaaatctccaggaaaccttttataatggcacgaatcctaaacacctcccccaaaggccccatctcccaacactgttgcattggagaatcagtttccaacacatgactttggggggacccattcagaccatagcaaagagaaaggagtttacattcagtcactcagaaaacaccttcactttcctggtgttatcccaggagcttgggccacactgggcaaatatggggaaaaaaaagaaaaatccctgcccacagcagctcacagcccctcggggagacggatgagataaataaccaaattggggagcaggttagaaggttgtacatgctatgcgataaaagaagaaggaagaagaaggaggaggagagaaaggaggaggaggaaagaagaaaaagaaggaaaaagaagaaagaagaaaactaacggtgatgggaacaactgtattaggttggtgcaaaagtcattgcagcacacaatgacttttgcactaagctaaatatataggttgttcagggtcccactgagaaggtgacatttgagcagagacctgaagggagagagtgagtcaagtgtatatttggaggacgagagctccaggcagagtgcacagcccatgcaaaggtcctggggcaggactgtgcctggtgtgctggaggaacagtgaggagggccctgtggctgcagcagagtgagccaggggaagagaggaaggaggggagggcagcaaggtgatgaacatgtcatgcaaggccttgtggaccttaggctgtgaccctgaggaaggtgggagccatggagggctgtgggcagaggagggacaggacctgactcaggtgctcacaggcgccctctactggctgctgcagggaggacaggctgtgggttggtggcggtggggcagtgaggacgggaacaggtggaccagtgcagagaggactgggctggtgcagggtggaggcagaggagaaga[137 bp omitted]acatggtgaaaccccatctctactaaaaatacaaaaattagccaggcgtggtggtgggcgcctgtaatctcagttacttgggaggctgaggctggagaatcgctggaatccaggaggtggaggttgtagtgagctgagatcgcaccactgcactccagcctgggagacagagttagacctctaactgggaactgacttgttcccagtggctcccagttatgggtgagccacagcaaagccggcttctctgtgcatgttagcatctgcgtgtttctctagaacaatttcctgaagaaacaaaaggggagattgccaaatggaagtatctgtaattttattttgtttatttatttttttttctgagagtctcactttgttgctcaggctggagagcagtagcgtgatcaggagttcctgcagcctcaaccttctgggctcaagcaatcctcccacctcaccctcccaagtaattgagactacaggcagagccaccacacccagctaatttttaaattttttgtacagatggggggtctcactatgttgcccaggctggtcttgaactcctgggctcaagcaatcctctcacctcagcctctcaaagcactgggattacagcacaagccacagtgcctggcctgtaattttacttctaatcctgcagccaggtcaccccaaatgccttgtgcacccccgatgtgtggtaaaggagggtgtgcacttcccgctatctacccagatgtaagctgttaccacgtttttgtgatctgtttgataaatcaaaagtgatatctgattatggcttaaacattcattcctcttagaacgagcgaggttgagtatactctcattggattaaaagccttttgtcagaactgtcttgaaacatactattttttaaattccacgatggccatttcccgtcagtgagagggttgatttgatgtttaatcttttgcgtttctacatccatctagctcagcgtcagttgctgagatctgggtcaggggtcacacccagctttttcttctcttacgtttgatgttgataaatgagaaaaaccaggtcaggtgtgctggctcatgcctggcattccaacggttgaggaagctgaggcgggaggatcacttgaggccaagagtttaagaccagcctgggcaacagagtaagacttcgtctctaccaaaaaatcaaaaagtgagctgggcgtggtggtgggcacctgtagtctcagctactcaggaggctgagataagaggatcacttgagcccaggagtttgaggctgcagtgagctacgatcacaccactgcactccagcctgggcgaaagaatgagaccctgtctttaaaaaaaaaaaaaaaaaaaggcctcatgtcgtggcacatgcctgtaatcccagcactttgggacgccaaagtgggcagatcgcctgaggtcaggggttcaaaaccagcctgaccaacatagtaaaaccctgtctctactaaaaatacaaaattagccgggtgtggtggcacatgcctgtaatcccagctacttgggaggctgaggcaggagaatcgcttgaacctgggaggcagatgttgcagtgagcccagattgcaccactgcaccactgcactccagcctgggcaacaagagtga[225 bp omitted]gaggcaggagaatagcttgaacccaggaggtggaggttgcaatgagccaagatcacgccactgcactccagcctggatgacagagtgagactccgtctccaaaaaaaaagagagtgatggggctcacacctgtaaccccaatacttcacagagctgaggagggaggatcacttgaagtcaggaggttgaggtcagcctgggcagcatagcaagactgtctgtactaaattttttttaattagctgagcgtgatggtgcatgcctgagtcccagctacttgggaggctgaggcgggaggatcgcttgagcccaggagttcaaggctgcagtgagctatgatcacaccactgcactccagcctgggtgacagagcaagatcctgtcttaaaataaataaaataaaaattttctaaatcctgcaaataatcttatcggaagcatttagatcgaatttttaaatatactccacagtgaatcatccatttctgtctccaacaggaaaagaaaatcatgatgaatcagcgaaaggtcacacccttggtgactgagccatttgtgcaaaagcttcattcttttccagaaaccccagtttgtcctcagagttaagactgtcagctccaaagggatggccccaggctgtgctagtaactgaaaacctccccacgacacaagcctgaaataaccgctgtgggtgtgggtggtgttattgatgtcacaaagaaatatcatctcaaaactcatgtttcaaaaatgcttgtgagggctgggtatggtggctcaggcttgtaatcccagcactctgggaggccaagggaggtggatcacttgaggtcaggagtttgagaccagcctgaccaggtcaggagtttgagacccaacatggtgaaaccccatctgtactaaaaatataaaaattagccgggtgtgatggcgcgtgcctgcaatcccacctactcaggaggccgaggcacgagaattgcttgaacctgggaggtgtgggttgcagtgagcaaagattgccccagtgcactccaacctgggcaaca[187 bp omitted]gtggcgggcacctgtagtcccagccactcgggaggctgaggcaggagaatggcgtgaatccaggaggcggagcttgcagtgagccgagattgagccactgcactccagcctgggcgagactccgtctaaaaaacaaacaaacaaacaaaacacgtataagcacctttttccaggaatgccaacatccttccaagggaaaagagcaaagtctcgtcaccacggtccagcttgtcctacagctgatgagggtgatggagctgctgtaatgtctgtcgttttcttcactggaagatgagaagataaatgtgggcggtctttgctgaataaagcagtgtgggatttgtggttcccgagcaaactgtgtttgggtagcaagggccctttctggttgctccccaagctggtcgcctttctggactgaccccacccaccctccccaagttactctgtggcccccaaaacaaagtttttttgttttgtttgagacggaatcgcactcttgtcgcccaagctggagtacagtggcgcgatctcggctcactactacctccgcttcccgggttcaagtgattctcctgcctcagcctcccaagtagctgggactacaggcacccaccaccatacccagttaagttttgtatttttagtacagatggagtttcaccatgttggccaggctggtctcaaactcctgacctcaggcgatccacccgccttggcctcccaaagtgctgggattacaggcatgagccactgtgcccggcacttcttccatctttacctggtggtcattagatgttcaaccctgggggtgttgggagacacccccagagggcaggccagggcctggcctgcagctattattacaggctaagttagcaattgacaattgaggacttactatgtggcagccacaggtccttccttccttccttccttccctccttccgtccctcttttcttttcttttctttctccctctgtcacccaggctggagtgcagtggcacgatcttggctcactgcagcctctgtctcccaggttcaagtgattcttgtgcctcagcctcctgagtagctgagattacaggtgtgtgctaccacacctggctaatttttgtgtttttagtagacaagggatttcaccatgttggccaggctggtcttgaattcctgacctcaagcgatcctcccacctcagcctccccaagtgctgggattacaggcatgagccactgtgcccagcccatctaatttttgtttttgttttttgagacagagtctcactctgtcttgcccaggttagagtgcagtagctcgatcttggctcactgcagcctctgcctcctggattcaagcgattctcctgtctcagcctccagagtagctgggattataggtgcctgccaccacgcctggctaatttttgtatttttagtagagatggggtttcaccatgttggccaggctggtctcaaactcctgatctcaggtgatccaccaacctcagcctcccaaagtgctgggattactggcgtgagccaccgtgcctggcccatctaatatttttttaaatgtttattgagaccttatttacatatcagtcaataaacatatcttcagttgtatggttcaataagtttgacaaatgcatacgctcgcataaccaaaacaagatatagggcacttcactccctccagaatattcccttgtcaaccctccacactcagtggcaactacggatctgttttctccaactatcagtgagaattacatgtttagcacttcatataaatggaattgtgcagaatgtcaccatttgtgtctggcttctttcccttggtgcaatgcatttcagattcaccccaaaacagccatgtttctttcttttttttttttttttttgagacggagtctcactctgttgcccaggctggagtgcagtggtgcaatctcggctcactgcaggctctgcctcctgggttcacaccattctcctgcctcagcctcctaagtagctgggactacaggcacccaccaccacgccctgctaatttttgtattttgggtagagacggg[132 bp omitted]gtcctttttcattgctgtgtagtattccattgtattgatgggccacagtgtgtttatacatttaccagttgatggacatttggcaattgcagttggagcaactgtgaactcattcatgcacacagctctttgtgggtatcttgtgatattttaccctccaatttcactcagtctcatggaactttctcctaccagggacacctatggtaaggtgatttccagcatgggaactttgctaaagaaaggggcaattgggccgggtgtggtggctcacgcctgtaatcccaatactttgggaggctgaggcaggcagatcacgaggttaggagatcgagaccattctagctaacaccatgaaaccccatctccactaaaaatacaaaaaattagctgggcgtggtggtggtggtggtgcatgcctgtaatcctagctactcaggaggctgaggcaggagaatcgcttgaacctgggaggcagacattgcagtgagctgagattgcacaattgccctccagcctgggcgacagagcaagactctgtctcaaaaaaagaaagaaagtggcaatcggccagatgtggtggctcactcttgtaatcccagcactttgggaggcttgtaatcccagcacctggatcgcctgagtccaggagtttgagaccagcctggacaacataatgaaaccccatctctaccaaaaatacaaaacaaacaaacaagaacaaaacaaaacaaaacaaaacaaaaacagccgggcgtggtggctcagcactttgggaggccgaggcgggcggatcacccgaggtcaggatttcaagaccagcctggccaacatggggaaaccccgtctgtactaaaagtgcacaaattagtcaggcgttgtgacacatgcctgtaataccagctactcaggaggctgaagcaggagaattgcttgagcctgggaggcagaggttgcagtgagctgagatcaggccactgcactccagcctaggcaacaagagccagactctgtctcaaaaaaaagaaaaaaaaattagctgggtgtatggcatgggtctgtagtctcagctacttgtgcagctgaggcgagaggatctctttagctcaggaagtcgaggctgcagtgagctgagattgcaccatggcactccagcctgggtgacaaaatgagaccctgaaaacaaaaaagaaaagaaatagagaggaaagaaagaaagaaagaaaggaaagaagaaagaaagaaagaaaaagagaaagagaaagaaagagagagaaagaaaagaaaagaaaagagtggcagtggctgtccttgtacctaatcataggacagaggggagaccagacccagcataggtgagggaagccgtcagggtcattagtggcagctggtgtgtctgaaacagccatggtagggcagcaggatgacccagacaggaccttcggtttatcacaggggacaggagtggaaatcaagagaccctagagggcctggggatcacttgaaaagggtcacaatgatagcatcaggtggggctcatggtccagccctgcccccctggagaaggagcacagggcagcctctgagccccggcctcggcatcagtgcggttgacaccggggccatcaccatctgataataggttctgtttggaacagctgcctggtgacaagtataataaaacgtattaacgaggccattattactccctaattaaaagctaataactaagagttaattgcctttaaaagatgaagcaaggctgggctgggacttatctctgttttcctttgcttgcctggataggctgatatttgggaactaattaattgagtcgaatcttacaggaaactaatatctcctctgccattgcggctgttggattaaaaagcgtttgctgtgtgtctgggcatttctgtggaaaggtctcctgtgtccactgttcttgccggggcgggggtggtggtggtgaggcttcaaggtgcggctatggggggctgcttgtcctctcctttcctgctgattctcccgcaatggtagcccaagcatccatgcaatttgtgagtcagaatgctcagatgctgttccagggaacagacgggccgagcttatatcacagatctatcgtcgtcatcatcatcaccgtcattaaaaaaaaaaatcaggctaggctctgtggctcatgcctgtaatcccagcattttgggaggccaaggcaggtggatcccctgaggtcaagaattccagaccaacctggccaacgtggcaaaaccccctctctactaaaaatacaaaacttaggcaggcatggtggcaggtgcctgtaatcccagctactcaggaggatgaagcttaagaatctcttgaacctgggaggcggaggtggcagtgagctgagataagatggcaccactgcactccggcctggacgacagagctagactccacctcaaaaaacaaaacaaaacaagacagtgctctaactgcaagcatacaattcgatggcttttgtacatataaacacttcagttaccaacactttaacaaaatagaacaagggttagcaaactctggtccctgggccacattcagtccactgcctgattttgtatggcccatagactaaaaatgtttctacgttaaaacaatttttaataatattcaagcttttgctcattctttcatttatgcaattttctttgagatggagtcttgctctgttgcccaggctggagtgcagtgacatgatcatagctcactgtggcctggacctccaaggctcaagcaatcctcccacctcagcttcctgagcagctgggactacaggcaaccccgccctctcctcctgcattcagcttggatgttgcttcctccaggaagccttccatgcctcctgatgcccatctctctgggtgccctaggtgctaaggacggctgcgattatgccactgcactccagcctgagcaacagagtgagacctggtctctaaaaggaagagacatctttctccatgaagcctcaaaggatttcaggcatctttccacacttaactgaaaacctactcccagactgagatttaagcagcctgtgtggactgggaggaaactttaaagagctttacaggacagggcagggaagggctgtcagcagaaggctcagcccaagcgaaggttaggatgccgagcttgtcagagggggtttgaggaggaaccggtgtcggcctgggcccggcccacctggagccctcggcgcagtgaacatcagctgtgctggtcacgttgcctccatcattctgtgcatctgtgcagcgtggccatgtgccagccaagaggacccagagtgtagcaagaacaattagcccatgacggatggcgcctcggtccaccttacttttggcaaggctaattgttgaagtaaagcttccaccggggtcactcgctactgcactgggcggtgtttcccaaaccccgtctccaggaaactgacatggacctgggagttgtgggagggggtcccctgagctggtttgctctcagcactggggtctctgcagagtctcccaggaaaccacctgggcttggcttgggtgtttgttgctgggaaggtttatcatgtataagaccacagacctcagtccatcccctccctccctccctccctcctttccttccttcctccctccctcccttcttccctccctccctccctcccttcttcccttccttccttccttcctacctccctccctcctttccttccttcctttctttcttttttttttttcttcagggtgttgctctgttgcccaggctgtaatgcagtggttccatctcagctcactggagcttcaacctcctgggttcaagcaattttccacctcagcctcccgcgtagctgcaaccacaggcatgcactgtcacaagcagctagctttttacatttttagttgagatatggtcttgctatgtgttgcccaggctggtcttgaactcctgggctcaaatgatccacccgccttcgtctcccaaagtattgggattacgatgtgagccactgtgcccagcttcctgtccttaaaaaaaaaaaaaaaaggcc[141 bp omitted]gtggtgcacgcctgtagtcccagctactcgtgaggctgaggcagaagaatggcatgaacctgagaggc[132 bp omitted]cagacaggatactgtacacgcttcactcagcttcccccgatggttacattttattacatgatcaaaaccaggaaattgatatggatacaatgtattcagttctttttttttttttttcttttttgctcgttctgtcacccaggctggagtgtagtggcgtgatctccactcactgcaacctctgcctccctggttcaagtgattctcctgccccagcctcccaagtagctgggattacaggtgggcgccaccatgcctggctaatttttgtatttttagtaaagacggggtttcaccatgttggccaggatggtctcaatctcttgacctcctgatccacccgcctcagcctcccaaagtgcaatgtatctatttctatgtaattgtatcacatgtatatatatatttttaagagagacagggtcttggggccgggcgcggtggctcacgcctgtaattccagcactttgggaggc[135 bp omitted]gaggcaggagaatggcatgaacccaggaggcggagctggcagtgagccgagatcgcgccactgcagtccagcctgggcgaaggagcaagactccgtctcaaaaaaaaaaaaaaaaaaaaaaaaaagaaagacagggtgtcactgtgtcacccaggctgtagtgcagtggtgtgatcatagctcactgtagcattcaactcctggggtcaagcaatcctcccacctcagtatcctgagtagctgggactacaggcatgcaccaccgtgccttgctgatttttttaatagagagggggttttgctatgttgcgcaatctgatcccaaattcctggcctcaattgatcctcctgcctcagcctcccaaagtgctagcattacaggtgcataccaccacactaggcttattttaaaatttgtctgtagagatggggttttgctatgttgcccagtctgatcccagattcctagcctcaagtgatcctcctgcctcagcttcccaaagtgctaggattacaggtgtgcaccaccacactaggctaatttttaaatttgtctgtagagatggggttttgctatgttgcccaggctggcctccaactactggccccaagtaatcctcctgcctcagcctcccaaggcactgggattacaggcgtgagccaccatgctcggctatcacacataaattcttgtaactaaccacagatgagatacagaactattcggtccccacaaagatctctctaaagctactccctgggagtgacccccaccccattcctaaccctaggcaacccctaatctcttctccagtctacaactttattatttcaagaatattataggacgggtgtggtggctcacacccataatcccagcactttgggaggctgaggcgggtggatcacttgagccccggagttcaagaccagcctggccaacacggtgaaaccgcctctgtactaaaaatataaaaattagccaggcttggtggtgggcgcttgtaatcccagctactggggaggctgaggcaggagaatctcttgaacccaggaggcagaggttgcagtgagtcaagatcgtgccactgcactccagcctgggtgacagagcaaaattccatctcaaaaaaaaaaaggaaagaaaagaaaagaaaattatatatatatgtgattaatggaatccaaacctatgttgcattttgaaattgcctttttttttctgtgaacattaggcccttaggagcagccagggggtatgtgggggtatcagcagttccttcctttttagccctgcgtcgtattccgtggtgtggatggaccacagtttgttcaacgatccacctgttgaagggtacctgggtggagtccaggttttgtctgttgggaataaagctgctatgaacatttgtagacaggtttttgcatagacatacgttcccatttttctaggatgaatgccaggagtgcaattactggacgatgtggaaagtgtttcgggttttaagagttttcccagagtggctataccatgttacatccccaccagcaaaggatgagggatccagtttccctgtacttagaacgtcttttatccccattcaggctcatcctggaagccacacatcccagcgtttgcagaggctcctgggtttcacggagaggtctgggaaggggagaaaaatgcgagcttgtggttctattctaggaaatcgccacaggcttcactctggagttggaaatctcgcctgtggagctcagagccttcataagcttgtgggatccaagatgcctcacgactgccagacagagaatccacacagatcgggcgccagaatttgaagcaacagtcaggctccagcaggattttatcttaaaaaacaaaataggcaattggctgggcgcagtggctcacacctggaatcccagcactttgggaggtcgaggcaggaggattgcttgagcttgggagttcaagaccagcctgagtgacatggcaaatccatgtctctacaaaaaatacagaaaaatgagccgggtgtggtggcgagtgcctgtaatcccagctacttggaaggctgaggcaggaggatcgcttgaacccaggtggtggaggttgcagtgaaccaagattgctccactgcactccagcctgggcaacagagtgaggacctgtctcaaaaacaaaacaaaacaaaacaaaaacaaaaacaattgctttactttatcttattgtcacttccatttcatttaccattgcaactgtgtgcaaatgcttagaatgaacaaagaaattatgaagtgccagggggaaatattgccatatttttcttcccccaaattgcacgctagaacaatcccacacccttccctgccactttgattttgcaccaccaatagtcatgggggacacttttacaagaagaaaaaaataaaaataaaaataagaaggccaggcgcagtggctcatgcctttaattccagcactttgggaggctgaggttggagatcacttgagcccaggaatttgagaccagcctgagcaacatagcaagacttcatctctacaaaaaattacaaaataagccaggcgtgttggcacatgtgtgtagtcccagctactcaggaggctgaggtgggaagattgcttgactccaggaggttgaggctgcagtgagctctgattgcactctgggagacagagcaagaccccgtctccaaaaaaaaggaaaaaaaagaaaaaagaaaagaataaaatgaggctctattagtttccccaagagtctcttttaatccactgctaatcaaatctctctctttttgttttttaactttttgttttggactaattatagacttacaagaagtttcggccgggcgcggtggctcactcctataatcccagcactttgggaggccaaggcgggtggatcacaaggtcaagagattgagaccatcctggctaatacggtgaaacaccgtctctactaaaaatacgaaaaattagccaggtgtggtggtgggcgcctgtagtcccagctacccgggaggctgagg[136 bp omitted]tagatacccttcatccagcctcctctaatggtgacgtcttatatgaccttggggcaatatcaaatccaggaaattgatgttgggataacactgggaaatagacagatatacaaattgtgatattttctaaacctgcattcgtgtgtgtgcacgtgtgtgcaaacctgcattcgtgtgtgtgcacgtgtgtgcaaacctgcatttgtgtgtgtgcacgtgtgtgtaaacctgcattcgtgtgtgcacgtgtgtaaacctgcattcgtgtgtgtgcacgtgtgtgtaaacctgcattcgtgtgtgcacatgtgtgtaaacctgcattcatgtgtgcacgtgtgtgtaaacctgcattcgtgtgtgtgcatgtgtgtgcccagttctatgcagttttattccatgtatagattaatgtaaccatcaccgccatcaagatacagaactgttccatctttacaaagtaactccctcatgctacttttttttttttttttgagatagggtcttgctctgttgcccaggctggagtgcagtggtgcaatctcagctcactgcaaccgccacttcctgggctcaagtgattctccagtctcagcctcccgagtagctgggactacaggcacacaccaccacacctggctaatttttgtagtttttgtagaaacaggttttgccttgttgcccaggctggtctcaaaacactcctgagctcaagcaatccggccacctcagcctctctctccaagtctgggatcacaggcgtgagccactgcacctggtcaccctcatgctacctctttatattcaacatcccacctccacttccctgtcccatcacaaccactaatctgttctctatctctatggttttgccattttgagaacatcatataaataaaatcagagagcatgtactctttgaggttgactgcttttactgtttatgagacagagtcttgctctgtcagccaggctggagtgcagtggtgagatcatagctcgccgtagcctcaacctcccaggttcaagcaatcctcccacctcagcctcttgagtagctgggactacaggcatgcaccaccacgctcagctaattttatttatttattttttttaaagatagagtctccctctgtcgcccaggctggagtgcaatggcacaatctcggctcactacaacctcggcctcccaggttcaagtgattctcctgcctcagcctcctgagtagctgggattacaggtgcgcgtcaccacgcccagctaatttttgtatttttagtagagacagggtttcaccatgttggtcaggctggtctggaactcctgaccttatgatccacccacctcaacctcccaaagtgctggaattttatttgtttatttatttagatggagtcctgctctgtcacccaggctggagtgcagtgccacaatcttggctcactgcaacctctgcctcctgggttcagacgattctcctgcctcagcttcctgagtagctgggactacaggtgcccaccaccacgtccagctaatttttatatttttagtagagagggggtttcaccatgttggccaggctggtcttgaactcccgacctcaggtgacccgcccaccttggcctcgcaaagtgctgggattacaggcatgagccaccacacctggccaaatctttaaaaactttttttgtagagacgggagaatatcgctatgttgcccaggctggtcttgaactcctggccccaagtgatcctcctacctcagcctccccacagggctgggattactggcgtgagccactgtgcctggtctgttttcacttcatcatgctcttgaggtccatccaggtctcaatcttttgtccttttttttttttttttttttgctgagtaatattccaggcatggaatggaggtgctgccatatgttcaaccatccaaccacagaagggcctctggtttccagtattttgctatcatgaataaagctgttatgaatgtgtgtgtactattttttgcatgaacacatgttctcatttctccaggattggtgcctgaattgtattcaattgccgggtggtatgcgaattgcatgttccagctttggagaaactgccagactgtttccacagcggccacgccctcttacatccccaccagcactgcgggagagagccagtttctccacgtcctcaccagcatttggtgttgtcattattttttactgttctaataggtgtgaagtggtgtgtcattctagttttaacttacatttcctaatggctgatgctgttcaacatcttttcatgtatcagatctttctctttaaaaacaaaaaattcattcaggctttccatacaggaaacagtggattattccattacacacacacacacactcacacagacacacacatagacacacacacacattcacacacatacatactcacatatacacacacatacacacacatacacatacacacacacatacacacatacacacacacacagatataattttttttttgagatggagtttcccccttgtcacccaggctggaataaagtggcaccatagctcactgcaacctccacctcccgggttcaagcaattcttctgcctcagcctcccaagtagctgggactacaagcgctggccaccacacctggctaacttttgtgtttttagtagagagagtgtttcaccatgttggccaggctggtctcgaactcctgacctcaggtgatccacctgccttggccttggcctcccacagtgctgggactacagacgtgggccaccgtgcccgccccccacctcttttttttttttttttgagacagggtctctctcagtcacccaggctggagtgcagtggtgcaatcatagctcactgcaacctccacctcctgggctcaagcaatccttccacctcagtctctgaagtagctgggactacaagtgtgcaacactatgcctggctaattttgtttgttatagacacaggggtctcactctgttgtccaggctgattttgaattcctgggttcaagtgatcctcccccagtgctgggattacagatgtgagccaccatacccagcctccaatgcacatcctggtgaatttttacattcatattgtgaggggtgagtgaacggtgggctttgggtggggggtcagaaactccccagcacccctagttcaccctcacagggctgagcttacttctgcaggcagagcaaatcccccaggcggactttgccgtttgcaatcagcagtcattaattagtgtgtttaggtgaacacagctgttgtgatcagggcctctgcagtatccactaatttatttttattttatatttttttgagatggagtctcggtcttgttgcccaggctggagtgcaaaggtgccatctcggctcactgcaacctccacctcctgagttcaagcaattctcctgcctcaacgtcccgagtagctgggattacaggcacccttcaccacgtctagctaatttttgtatttttagtggagatggggtttcaccatgttggccaggctagtctcgaactcctgacctcaggtgatctgcctacttcagccttccaaagtgttgagattataggcgtgagccatggcgcccggctgtatccactaatttaacagtgactgacttattttccagggcgtcccactgttctcaggacacgcccctcaatgtggccctcacagctcatgctgaggtttgaaggtgccccttccaaaattcacatgttgggacttaatggccaatgtgatgggtattaacaggtggagcaggtaggaggtgattggggcctgaggacaccttcctggtgaatgagattaaggccctcataaaagaagcactgagaacggtcggctctttttgcccttccaccctgtgaggacaaagcgttcttcctctccagaggatgcggcaaccaggtcccgtcctgaagcagacctcagccgtcacgagcgactgacctgccggcaccttgatcttggactacctgacatgcagaaccgtaaggaaatcaatttctgttctttataaatgacccagcctgacgcattttattagagccatgaaaatggattgagacaatcctccatctcttgcctctgcctctccgaatttgtttcatgcaatattccccacccccaaattcctcaaatgcaccaagcccccatccatcttgccagcctttctctgggctgcttcccagaaccactttcatccttccttcaggccagctccttcctattcatccttttgaatcttggcttaaacgccacttcctccaggaagcctcccctgcttgctaccttccggtctgagcccctgttccagatcctcacatctccctgggctcgcctttggagaacttctcatggccatatttataaccatgatttgcaggcaatgtagggcttctcttatctgccttgatttgcttaaggccaggggtttgagactggcctaggtaacatggcaagaccccccccccccgccaacccacccaccaccccatctcttcccacggggcagaaaatccagccttgcggtatccgagacactcagcctggagcctggtatacagtaggtgctcaagcagagaaactcaggaggggagtgaagcgcggcctaaatcacgtggctcagcccattgcatatttcctgctgttttccacgtcccccgggggacccactggccctctactcaggacgccaggaattgaaagtaagtgttccctccacaagtttcccccatctacgttcatcttctgcacgggctaattttattaaagttcctcaaagagagaattgtaaattcattagcacgcatgttagaccagaccttcctttacgccgggtagaaaaagattaggagtcagctgagcccgatgataatgaaacagaagatgctaaaacatcattcttaattaaactgtaatgagataagaagttgtcgccggcttgtgggcctggcttgagtcgctcatgttcccatcgtaaatctatgatttatggttctcctccctcacagatgtaattagttttttccccctctaaacaaaaaatcctaaacactacttcgattatatatatgtataaaaagcctggaccacaattggaggttgtttttatctagctggaataataacttcaattaggaaaaaaaataaatgctggaggttgaaagagggagaattcaagaggaggagatgaaggaaagttggggggaagtgcccagttccgtcctggcccagactcttggactctgcccaggtggtgcttctgccaggatagcccttggtcattttagggatctgcggacatttttcactgtggaaaccttccccagatccctgtgtctccctgagcctcatagctggtttgtggcaggttttgtatcatggtagatctcgcagctgcatgcttcaagaatatttggggtctaggctgggtatggtggctcacgcctgttattccaacactttgagaggccagagcaggaaatttgcttaaggccatgggttcgagaccagcctggttaaca[187 bp omitted]gtggcgggcgcctgcagtcccagctactcaggaggc[136 bp omitted]tgcatgcctgcagccccagctactagggaggctgagctggcagaactgcttgagcctggaagttcgaggttgcagtgagctatgattgcaccacgcactccagcctgggcaaccgagcaagaccctgtctgccttcctgttgtctacctctcttccccaagaggaaccaggtgcctgactttggggactccacaatctcggggagggaagctgatgttcatcagataaccacacaccaaaatgagagctatggtagctggacagggtgggaggagagctttggacgaaggcccagaggtgggacagcaaggatgggatgatgggaagctggggagtgaggagttggccttgggaggtcctgggaggtttaaaagtctgttttaaattgagatcatttacatagcataaaaatcaccgctttaaagtggacaattcagtgttgttttagcacaaagcgtgcaaccatcacactatgtaattccacaacgttccagcaccccaaaaagaagccctggctgggcgcggtggctcacacctgtaatcccagcactttgggaggctgaggcgggtggatcacctgaggtaaggagttccagaccagcctggcccacatagtaaaagcccatctctactaaagatacaaaaaattagctgggcgtggtggagggtgcctgtaatcccagctactcgggaggctgaggcaggagaatggcttgaactcaggaggtggaggttgcagtgagccaagattgcactattgcactccagtctgggtgacaggctgagactccgtctcaaaaaaaaaaaagcccatccctatcaacagtcactctccctcccctccccaaccctgtggtcagccacaaatccccttcctgtctctgtggattggcctgtcccggacatttcatggaagtgagatcatacactgtgtggccttttgtgtctggcgccactcactgagtctgaggtcctcaaggtgcatctgtgctgtttcctgtgtcagagcctcattccttttcatggctgaataatattccattttacagatagaccctgttttctttacctattcttgtgttggatgttcggattggtttcacatcgtggctgttaaaaatcacactgctataaac[131 bp omitted]gaaacctcatctctactaaatacaaaaaaaaaaattagccaggcatggtggcaggtgcctgtaatcccagctacttgggaggctgaggcaggagaattgcttgaacccgggaggcggaggttgcagtgagctgagatcacgccactgcactccagcctgggtgacagagcgagattccacattctaccacagtgtagccgcatcattttacctcccgccggctgtggacaaggactcccgtatctgcacacccttaccagcgcttgtgagtgcacgtttttctgtctgtgtttgcttttcgcttggattctagctctcacagtgggtgggaagtgtggggtcgtgcaatagctggttcaccgaaagggatcgcgcttgcgggcggctcaaactggagtgatggtgccagggaggcccggggacaggatgcaatttgcaattccccgtagctctctgtcatcctcctgcccagggtcctatttgagggctcccacagtgggagtgtttcaggaatggggttccgatccagaccctgagagagagggttcttggatctcacacaggaaagaagtcagggcaattccataaagtgaaagcaagtttattaagaatttaaaggaggctgggcgcagtggctcatgcctgtaattccagcactttgggaggccgaggcgggcggatcacctgaggtcaggagttcgagaccagcctggccaacatggcgaaaccccttttctactaaaaatacgaaaattagccgggcatgttggcactcgtctgtaatcccggctactcaggaggctgaggtgggagaatcgcttaaacccaggaggcagagctgatagtgagccgagatcgtgccactgcactccaacctgggcgacagactgagactgtgtctcaaaagacagtaaaggaatgaagaatggctactccatagacagagcagccctgagggctgctgattgcccatttttaggttttttcttgatgatatgctaaacaaggggtggattattcatgcctcccctttttagaccatgtgggtaacttcctggcgttgccatggcatctgtaaactgtcatggtgctggagggagtgtagcagtgaggacacccagaggtcactctcgtggccatcttggttttggtgggatttgaccagcttctttactgccacctgttttatcagcaaggtcttagtgacctgtatcttatgccaacctcttatctcaatctgtaagttagaacatccaacctttggctgggtgcagtggctgatgcctgtaatcccagccctttggggggccgaagcgggcggatcacctgaggtcaggagttcgagaccagcctgaccaacatggaaaaacctcgtctctactgaaaatacaaaacattagcttggcatggtggcacatgcctgtaatcccagatactcaggaggctgaggcaggacaatcgcttgaacctgggaggtggaggttgcagtgagccgagatggcgccattgcactccagcctgggcgacaagagtgaaactctatctcaaaaaaaaaaaagaatgtctaaccgtctgggaatgtcacccagtgggtctcagcctcattttacccaactcctattcaagatggagctgctctggttcacacgcctctgacaggagggaggagggggttaagccggcccagacatctcagagctgggaaacttcagctgggcccccaaacacagcgaggctgcctattcaggggagccattcagccgttgccctgtttgaaaaggccaagcctctgtgtgcaaagcctcaaggcaaagtggcttcgtgccttcctttgtgaggtccagctgctggctctttgtctggggggctgtgggggtgggggcaggcctgccctggcctctcctgaaaccctcccagctgcagccacccctttgtctgccctgattgaaatgcgaagagaaaattagaattccctggccttctctcctcctctttcttctggattttaatgaattcagcccttacaggctgcgcaggtgaagaaaatggctttggagacttttttgttgttgttgaattattttcatttccaggacgatgttcgcgttcaacttcattccgcagaaggttcccctaaagtggtctgggctgctgcttcctgatttctggctggtcggccagagttccaatcagactttttgttttgaatccacaaagagactttctagagctttatctgatctgttctaggaggcagataaccataaataaaattaaatatgaaagaaacaaaattatggtaataaaagtttgcctgcccaaggacttgaactttaagccaattgtcctaatcacagtggtttatgactgtcatcccagccctttgggaggctgaggcaggaggatcacttgagcccaggagatggaggctgcagtgaggcgtgtttgtgccactgtactccagcctgggaaacagagtgagattctgtctctaaaataagttttttttttttttttttttttttttttttgagacggagtttcgctcttgtcaccccggctggagtgcaatggcacgatctcagctcactgcaatctccacctcccgggttcaagcgattctcctgcctcagcctcccaagtagctgggattacaggcacccaccatcatgcctggctaatttttgtatttttagtacagacagggtttcaccatgttggccaggctggtcttgaactcctgacctcagttgatctgcctgcctcggcttcccaaagtgctgggattataggcgtaagccaccacgcccgggctttaaaataagttttaaaaatataaaccgttggccgagcatggtggctcatgcctgtaatctcagcactttggaagggccgaggcaggaatattgcttgagcccaggagtttgagaccagcctgggcaacacagcaagaccgcgtctctttaaaaaaaaaataaaataaaaattatataaactaaccttcagaggagatggcgccttatcaacctgtctgggcttcccaccacattaataaaactggggtggatggtgggaccagtgagtttgtagccatctacactgtcttcaaatggcacactcttgtcgctggtcctcatgtgagctgtggcttcctctagacacagccttgccctgcactccccctcccctaggaagatcttggaatcttattcactgtgcaccttgagaaagccgttcctgatgccctcccaccgatgtacccacaaccactcatgccccacctggtagagctcttggcaccaagaattgaaattgctgaaattgtcttccctgagtctcactcagcaacaaaacccatgtaagcaggaagtatgtctggttcactttttttttttccaagacaaggtctcactctgttgcccagtctggagtgcagtggcacaatcttggctcactgcagcctctgcctcctgggttcaagtgattctcctgcttcagcctcccgagtagctgggactacaggcgcctggcctcatgcctggctaatttttgtattttttagtagagacggggtttcaccatgttggccagggtggcctcaaactactgacctcaggtgatccacccacctcggcctcccaaactgctcagattataggcgtgagccactgtgcctagcctcttgttcactattgaatttccatggccttgtggcttgttgagggtagggaagactctagggccaggaggtccaggttcacatcctggctctgctatttcctggctgtgtgaccttgggcaagttatttaacctctctgtgccagtttactaatctacaaaatggggatgatattatatcagagggctgtgaagtactacgggcagtcactcaataaatggaagctgtttctcataagatagtggcaggaccccgggaaacagcatagttagcaagatatagctctgtctcagtctttcgtttgttttttgggacccaggctggagtgcagtggtgcagtcatagctcactgcagcctcgacctcctgggctcaggagattctcctacttccccgaatagctgggaccacaggcacatgccaccacacctggctaatttttttacagagacagggtcttgctatgttgcccaggctggtctccaactcctgggctcaagtgatcctcccaccttggcctcccaaagtgctgggattccaggcatgagccaccatgtctggcctctgtctcattcttgtggctgcttctctctgcctgtggtaagctgagtctataacagcagagatggatggaagcatgttcctttatgttttgttttatttttatttctttatttttttgagatggagtcttgttctgtcgtcaggttggagtgcggtggcactatctcggctcactgcaatctccacctcctgggttcaagtgattcccctgcctcagcctcccaagtagctgggattacaggtgtgcaccaccatgcctggctaatttttgtatttttagaaaggaggttttgccatgttggccaggctggtctctagctcctgacctcaagtgatctgcctgtcttggcctcccaaagtgctgggattacaggcctgagccactgtgcctggctatgctcctttatttatttattttttttccgagatggagtgcagaggcgtaatctcagctcactgcaacttccgtctcctgggttcaagtgattctcctgtctcagcctcccgagtagctgggattataggcatctgccaccacgcctggctgatttttatattcttagtagagacggggtttcaccgcgttggccaggctggcctcgaactcttgacctcgtgatccgcctgcctcggcctctcaaagtgttgggattacaggcatgagccacagcacctggccctgttcctttattttttaaatttgtttttaatgacacaattacgatataaaagcatttttcataatagaaatggtgccgtaaaaactaaagtttcgttcactcctctttaatcctatgctcactgtggccctctgtgctaattttattttattcattttttaagagacagggtttcgctatgttgctcaggctgtccttgaactcctgggctcaagcgatcctcttgcctcagcctctcgagtagctgggaccacaagtgtgccccaccaaacctggctaatttttagattttttgtagagatggggtctccccatgtttccccaggccgatctgaaactcctgggctcaagcgatactcccacctcggcctcccaaagtactaggattgcaggcgtgagccactacgccctgccccttgcctcagtattgaatttagtggccatggtctgagtaaatccagcccaccactggttttgtaaataaagtattattgaaacacagccatgcccattcactttgtctatggcttttatactttactggcacaggtgaccagatgcaacagagactttttggcctgcagagcttaaaacatttaccatctggttctttacagaaaaagtttgccaacttctgttcaaaagcttcagcattatcaagttaatgtctcaagttgagaaaattcatttcctagtttgctgagtgtttattttaaacatgctttaaaaaaaaatcaaatgctgggctggcacggcggttcatgcctgtaatcccagcacttttggaggccgaggcaggaggatcatttgaggccaggagttcgagaccagtctgcccaacatggtgaaaccctgtctctactaaaaataaaaaagttagccaggcatgttggcaggcaccttataatcccagctgctcgggaggctgaggcaggagaatctctcgaatctgggagctggaggttgcagtgagctgagatcacgccactgtactccagcctgggggacagagtgaaactctgtctcaaaataaataaataaataaaaagaaatgttgccccaaagcattttaaaaattgatttatggtatttttattatggaaaaatatttccacatatttgttataatttgttacatttttattatttattttaataagtgatataatgggcttggcatggtggctcacatctgtaatcccagcactctgggaggccgaggcagggggatcacttgaggtcaggagttcaagaccagcatggtaaatgtggtgaaaccccgtctctactaaacatacaaaaattagctgggcgtggtggtgggcgcctgtagtcccagctacttgggaggccgaagcgggagaattgcttgaacccaggaggtggaggttgcagtgagccgagattgcgcctctgcatccagcctgggcgacagagcgagactccatctgggggaaaaaaaaaaaaaaaaaagataaaatgaacaccatatacttaacacccaaccaaaaaaatcaaacactacacttttttttttttttttttgagcggagcctcactctgtcacccaggctggagtgcagtggcacaatcttggctcactcactgcaagctccgcctcctgggttcacgccattctcctgcctcagcctccctagtagctgggactacaggcgcctgccaccatgcccgccaaatttttttgtatttttagtagagacagggtttcactgtgttagccaggatggtcttgatctcctgacttcgtgatctgccggcctcggcctcccaaagtgcggggattacaggcgtgagccaccgcatccagccaacaatacacattttattgcatttacctatgtaccgtttgctgaatacattctccttcctcctgcacagaaggaacaattaccctgaatttgtttaaaggtgagcttttctctttttttttttttttttgttttttgttttttgttttttggacacagcatcttgcattgtctcccaggctggagtgcagcagcgtgatctcagctcactgcaacctctgcctcctcagttcaatcgattcttgtgtctcccaagtagctgggattacaggcatgtacccgcacacccagctaatttttgtatttttagtagagatgggtttttaccatgttgctcaggctggtattgaactcctgagctcaggtcatctgcctgcctcggctcaccaaagtgctgggattacaggcgtgagccatcacgcccagcctcctaagactttttagcttttagattttacatgtattttgagttactattttgagttattttcatctattttgagttactttttgtatatggtatgaagtatatagtttcatacttcgcatatagatacctaggtggtccagcaacatttgttgaagaagttattctttcctaattaaatggtcttggtacccttgtcaaaaatcaactggccaagactgggatcacacctgcaatcccagcactttgggaggccaaggcaggaggatcacttgaggccaggagttcgagatcagacttggcaacatagcaagatcctgtctctacaaaaaaaaattaaaaactagctgggtgctgctgggtgcggtggctcatgcttgtaatcccagcattttgggaggttgaggcaggcagatcatgaggtcaggagttcgagatcagcctgactaacatggcgaaaccccgtctgtagtaaaactacaaacattggccaggtgtggtggtgcacagctgtaatcctagctactcaggaggctggagcaggagaactgcttgaacccaggaggcggaggttgcagagagcccagatcacatccctgcactccagcctgggagacagagtgagactctgtctcaaaaaaataataatagtaaaataataatacaataaattagctgggtactaattggtggtggtgtggtggtgcatatagctactagggaggctgatgtgggaggattacctgagcctaggatttgacggctgcagtgaactctgattgcaccattacactccagtctgggcaacagagtgagaccctccttttttttaaaaaaaaaagtccattagccatagatgtgtgggcttatttctggattctcaattttattccattgatctgtgtgtctgtccttacaccagtaccacagtgttttaatcattgtagctttgtagtcagttctgaaatggagaaatttgggttttctaatggtatttttttcctgcaaaatgattttgactatatggattctcttgtaattcattatgaatttgtggagtggcttttccatttttgcaaaaaagtctttgggattttgagggggattgcattgaatcatagagtacgtgaggtagtattgccatctagatgagtttttatatctttgctgcttatagtgtttccccctaactaatacgtgtttgctttgtcagttttaaaatgttctgtgatgaaattgcactgtaacttttcttcctgaaatctgcttgttttgctcagaatatttctgagatttgttcaggtcatggtgtatagttttaatggcctcatattcgttgctgtatagtattccatcgtgtgcctgtatcataatttttttctttttctgagatgaagtctcactctgttgcccaggctggagtgcagtggcacgatctcagctcactgcaacctccacctcccgggttcaagcaatattcctgcctcaacttcctgagtagctggcttcacaggcatctgccaccatgcccagctaattttttgtatttttggtagagacggggtttcatcatgttggccaggctggtctcgaactcctgacctcaggtgatccgcccacctgggcctcccaaagtgctgggattatggcgtgagccaccatgcctggcctttttttttttttttttttttcttgagacagggtctcactctgttgcccaggctggagtacagtggcacaatcttggctcactacaacatctgcctcctgggctcaagcaatcctcctacctcagcctcctgagtagctgagattacaggcagataccaccacattcaactaattttaaaacattttttgtagtgatgagttctcactatatgcccaggctgctctccaactattgggctcaagtaatccgccagcctcagccgccgaaaacactgggattacaggcatgagccactgtgcccagactttcataattctttatacattttcctgacggctatttagtttggttccaatattttaacgacaaataatgccactctcgacatatctgtacatgtccccttggacatatctgcaagagtctctgtcagatgtatatctaggaatggaatcgttgactgaaaaagttaggtgcatccttaatttactagatactctcaacttgtcctccaaaagcaccaatctgttctcactcagagtttctaaagtcaaactatccttgcattccataaatctgtctgagtcataacattgtattcttttaatgagatgttagatttccattgctgaaattttcttggcctttttgcatctaggcacataagtggaatgtgcttttttcctccttagtttgtcctcgtacagtttaggtaccatctcttttttcacctcataagctgacagttgacaaaaggtgcaaatcatctcttccttgcggatttggcaaaactcacttggaaaactatctgggaaggtgccttgtatggggcatagatctttactatcacttcactattttctttctctctctctctttttttttttttttttttttttgagaaaggtctctccatcacccaggctagagtacagtggaatgatcacagttcactgcagccttgatttcctgggctcaggtgatttttccacttcagcctgcagagtagctgggactacaggtgtgtgctaccatgcctggctaattttttgtatttttggtagagatggagctttgccatgttgcccaggctgatcttgaactcctgggctcaagtgatccgcccacctcagcccccaaagtgctgggattacaggcatgcaccaccacaccctgctaatgtttgtatttttggtagagatgggatttcacaatgttggccaggctggtcttgaacccctgacctcaggtgatccacctgccccaacctcccaaagtgcttggattataggtgtgagccactgcacccagcttccccatctttttctctcttcactgtctgttcttacaactatcctatggagggagagaaggggattttttgcataccagttctgctaccggtagcctccactgcccctgtctgtttcctccttggctctcccaatactcatcttaccaaaaaaaagaaaaaaaaaaggtttcatctctaaagtgttctatccccacttttctgatattatttgtactttctcttttttattatctttgcctaaggtttttggagttttcaaagaaaaggtttttgatcttgtcaatgcaaaagagc[131 bp omitted]atggtgaaaccccatctctactaaatacaaaaaaaatagccgggcatggtgatgggtgcctgtaatccaaactacctgggaggctgagacaggagaatcactcttacctggcaggtagaggttgcagtgagccgagatccaccattgcaccccagcctgggcaacaagagtgaaactcttgtctcaaaaaaaaaaaaaaaaaaaagttatttccatctttatcttcatttttttttatttggggtttttttttctatttgagtttattttctagtgatttgattgaaaacttggttcatgaactttttaaagttgacttattttcaaaatttcttttcttataagtgtgttaaagaggccaggcacagtggctggtgccggtaatcccagcactttgggaggctgaggtagtaagattgtttaaagccaggagttcaagaccagcctaagcaacaaagtgagaccctcctacctcaaaataaaaaaagggtaaatgtgttcaaggctatgaatttttctctgagcacaccattggctgcatcccgcaggttatgcatttcatgatgtactatttgaattgttcaatttgaaacactttgtaactttcacattgattttttttttttcagaggcagtgtttccctatgttcaccccaaagtgctgggatgataggcatgagtcactgcgcccggattacattgatttaacacataccttatttagaaatgtgttttaaggctgggcacggtggctaacacctgtaattccaacacttcggtgggaggccgaggtgggcgaattacttgaggtcaggagtctgagaccagcctggccaacatggtgaaaccctgtaaccctgtctctactaaaaatacaaaaaaaaaaaaaaattagctgggtgtggtggtgggcgcctgtagtgctacatactcaggaggctgaggcaggagaatcgcttgaacctgggagatggaggttgcagtgagctgagattcagccactccagcctgggcaacagagcgagactctgtcccccacccacctccccgccaaaaaaagtattttaaaatttccctcccccttccaggggaggctaattactcttcagagccaagatcaggatacctcatctaatatttgtttcttggaatttgtgaagatctctgttaatattttttgtttgtttttttgagatgaagtcttgctctgtcacctgggctggggtgtagaggcgcgatctcagctcaccgcaacctccttcctcctgggttcaagcgattctcctgcctcagcccactgagtagctgggattacaagcgtgtgccaccatacccagctaatgttttttatttttagtagagacggggggtttcaccatgttggccaagctggtcttgaactcctgacttcaggtaatcctcctgcctcggcctcccaaagtgctaagattacaggcgtgagccactgcacccagccgatctctgttaattttcacaaatgttccatgtgcgtttgagaatgttagagtaggaggggataatagggtttgttaaatatttttggccaagcttattaatgatgttagtcacatctgtatttttttgactacctgatctgttgcttctttttttttttttttttttttttttttgagacggagtcttgctctgtcacccaggctggagtacagtggtatggtcttggctcactgcaacctctgcctcccaggttcaagggattctcctgcctcagcctcccaagtagctgagaatacaggctcctgccaccatgcccggctagttttttgtacttttagtagagacggtgtttcaccatgttggccaggatggtctccatctcctgacctcgtgatctgcccgcctcagcctcccaaagtgctgggattataggcgtgagccactgcgcccggccttgatctgttggtttctaagagacatagtcctattcttccctgagctgggtccctggtgtcactaagatcaccccttctcattcctggaacttccctgaggtcatagggggctctttcatcctatctctggctcctgtgggtggcttctatgcccaagcaagaagtgactcaggcaagggtatagatacaaaatggctcactctccatccccagggatgtgattctggctcagtgcatggatctgctcattgagtggcctaggggtggagcagagtgtccccaacctgttgcttccctccacggactcagttcttccccagggcacttcgagaaggcagcaccgtgtgatgctcagggctgcgggtgagatgggctggggtacgaatcccagctccacctcaaactcattgtgtgcccctccctgagcctcagtttcctaatatgtaaatggggatttttttttttttttttttttttttggagatgggagtctcattctgtcgcccaggctggagtgcaatggcatgatctcagctcactgcaacctccgcctcctgggttcaagtgattctcctgctccagcctcctgagtagctgagattacaggcaggtgccaccatgcttggctaatttttgtgtttttagcagagacagggttttgccatgtcggctaggctggtctcgaactcccgatctcaggtgatccatctgcctcggcctcccaacgtgttgggattacaggcgtgagccaccgcgcctggccaaggggctggtaacttctatctcagagtgtctggcccatggtgaattctcagtcatggtcacttattagaatgagaacacgaggcagcccctacaggaccagggcttgggttcaaatcttggcctggccacttcatcggtgttttgagttttttttttttttttttttttgagacagtcttactctgtcacccaggttggagtgcaatggcatgatctcagctcactgcaacctctaactcctgggttcaagcgattctcctgcctcagcctcctgagtaactgggattacaggcgcccgccactgcgcctggctaatttttgtatttttagtagagttgagtttcaccatgttggccaggctgggtttcaccatgttggccaggctggtctcaaactcctgaccttgtgatccacccgcctcagcggtgtgtggtcttggacaagcaccaccacctctctgggccaactcctcctctgactgttcacacaaggaaacgagatcagctctccaggaccccaccgacctccaccccagggatgaaactggacaggcaggggcgcaacaaagactccacaatgggccggggtcagacgatcttcctttaatacaaagtcgatatatctacatacacgggggtgggaaaaccacccggctgcttccgctggaataaacagtgttgaaagtaaccgcagacctgcccttgtacaaagaggaacaactcgcttgctcagggtaggcgggtagaggggggcctgtccttctggttttgctcccaaactgccccacagtcccagggggaaagggtccctgatgtggggcagcacagccatacagccactgtccccgaagaagtaggatcctctctgtctccttgggggcgggagacggggagacagctcaggctctcagaggaggaccactgtcatctctctcctcttacagcagcgtccccctcaaccgcacccaacgccactgggtccgagctcccccatgaccttaccctcagaactgtatttgatatgtctgaaaatttaatttataaaaatgaaacaaaaagggggaaaaaaaaagccaagaaagaaaaaaggacatcccattcttctgtgagcaaagcacactttctgatggtaggaaaaattaaaaaaaaaaaaaaaaaaaaaaaagccaaggtacagccatgggcctggcgtgcgcgtttgcgaacgtaactatcacacaaggacgctttctacagtgaaaaaatagactgtctttgaacagaatatgaataagccaaagttagttctctttgaaagtcattgactggcgagtcttttgtttgtttctcttaaaaaaaaaaatggaaaaaaaaatacactatttaaaaaaaatgaaatgtcacgggatacagttacactgagagttttaaaagaaagctggattctggtcccagcccagtgtccccaggctgcagagcggggaggagccccccgggtccccctaccaccgctgggggaggacgaggggtccgtctatggtctgtgccccaccctcctctggttctggggagcactcctatttgctcaccatccccccaccccccaccccggaatctggttttggaattggaaggaaaggaggaatgtgccaagtatttgaaggcggcggccggtgccagggaggtcgctggggcggccggggccggtgggggggctcgaggggctgcgtcgtcctcggaaatggtgcagaaacacagctgctgccgctgccacctcctgccctgcccactgggggtccaggcctcaggaggtccgcccgggaggggcagaggcatccggggccagtggtgtcgggcctggggggaaccatggctttaggttgcatagtggtcaaagcttccgaggtactccagtgccgcctggtaacagaactggtactcatcctgggggagcagaggtgacctgttagtacctccgctgctctaacgcctcccagggctccctatcgccctcaggagcaggccaagctcctcagccttgtgcgtgtctcttgcagaaggtctctttggcccccacggccctcccacaatgaagtgagctatgccacacctctctgcctaacacagccaggctcttcacccggaacgccctctcctcccgtctgcctggaggccctattcatcttttcttttttatttattttgagacggagtctcgctgtgttgcccaggctggagtgcagtggcgccatcttggctccctgcaacctctgtctcctgggttcaagtgattctcctgcctgagcctcccaagtagctgggatgacaggcgtgtaccaccatgcccagctgatttttgtatttttagtagagacagggtttcgccatgttggccaggctggtctcaaactcctgacctcgggtgatctgcctgccttggcctcccaaagtgctgggattacaggcataagccaccacacccagcctcatttctattttttttgtagagatggggtctttctgtgttgcccaggatgggctcaagcgatcctcccacctcagcctcccaaagtgctgggattacaggtgtgagctgccacgccgggtcccctctactcatcttttaagacatggctgctgttcagaaccccctccactggaacattccccttgaagctaggagtctgggcctcagtttccccatctgtacattggttggacttgggggtcagtggttcttggcagggtccaggctgagccacagacttgctgtgacttggggactgcaatgagcccatctctgtccactccaagggccacttctcgcctttgaccttcagctgactgttgtgttaaaagggttactggtccccttccagtgcgggaggggtctgtggaccgtctacccacagtgacccagagagtcccaggtggctgtacccatctcacagaggaggaaactggagcttaggggcagtcggggcgtgaggccaggctgcctcccctccctgtcccatctttacctctgtctgcaccatggccggccgctgggttcgtagcatcttcaccgtctgaaagatgtccaccacgccttcataccgcatccgctccagcacgatgctaagcgtgatgaagacgcccgtcctgcccacgccggcactggtggcagtaaagtgagcacagccattcaggggcaggtgctggggagccctgatctgaccacccgattccccgaggactctaacagcccagatgggacagcctaagcttggggctgtccccaccaggcctcagtttccccagcagggccaaaagctgggacactcgagggagctcacctgcagtggacagagatggggccgtcctggccaaactgctccttagtcttatgcacttggccaatgaagtcgatgaagccctcccccgactttggcacaccctgttccggccagtctgtgaactggaactgccggacagtccgggactggccatcctagagtgcagagagcccaatcttgttatcaggtcagcagcggccatgggggtttttctccatcctccctatcttcacccccattttttgtttgtttgtttgtttttgagatggagtttcactcttgtcgcccaggttggagtgcaatggcgtgatctcggctcactgcaacctccacctccagtgattcaagtaattctcctgcctcagcctcccgattagctgggattacaggcatgagccaccaggcccggccctcacccccattttgtacactctctgccattcatttaccctgacaacttaccgtccttcacaatccaatggtactgctttccataagagatgctccaacctcatcctcaccacttcttgccacccagctgttcctctccccacatttcctgtatgacatccagcacctccatcctccatcctttgccatcccatagtgcaaccagctctgcccttcccagctcctattcaccatgatcctctgtcatcttccactctgtgccatttcggggccctacagcacaactcaactccatcactgtccatagctcatcaatgatgactcatcttctacaacccaatggtgccatcatctttcatcgtccaccatccaacaccatcatcttccaccatccaataacagtgccactgctaccacccactgctggtaactcactaccttctgccgtcccgagttccacccaacaccatcatcttccatcatccaccaccatcccctcttggtaactcatccttaaccattcagtgatggcatcttccactgactgtcttcattccccactactcaaccattcctctttgcagtctcctttcctaccacccagtggtgccatccaaccacatcattctctgccatcttccatccttcacaactcaatggtgccattttccaccatccatcactaacaattcatcactctccaccatccaagggtaccatcttccactgacattctccattccccatcatctgccttgttctaatcccatcctccaccatcaaaatggtgccatccaaaattgttatcctctgccaccatttgccatccaatgtaccatctttccctgatgttttacattttctaaaatctcctttcccaaccccatcttcctcaatcttgtaccacccattggtttataccattgactattgtttactgtcctttcttagtcctagtatttcccattgattttctccaccccctgctggccaaacatttgcccttctccaattctgtcttcctccatccatcactgataaagcatcacccttcactgacccaaactaccacattccactgacattctccatcctgttatgcgaatgttcttctctccaattccagattccacccctccaagggcaccatcttgcactgctcacagcacaatgcccggtgattgctgttcattcagcagccttcaccatcctttggcatcatcttggccaacattccccatcctctatcatcccctcactgcgttctctaccatcgtcgatcttccaccactaactttgatcctttgtcacccaacagggccaccttccactatgagtcttcatctgttgccacctaatacctggcctttctccctccacctgacactgcagtccttcattgagccaacaccatccatactcatctctcctcacccaacggtgccagtccccaccatctgactctccttgtccaccgtctaccacccctcaccctcaatccctcaagtccctttcagccctttaacatcatcctccacaggtggctgcttccagaggaaagccccattcacttccttgaatatcatcccctggggccatgttccctagtgagtggagacactgcagggtcagcacagagataagaccctctcttccacctatgtggcagtagaagcaagtggccaactggtcagctgacacttctcctgattcccaatgcttatgcctaacccttggcctttgtatccatcaccaaccagggcagccctttccagatcactaaggctccagcccctcccgccagtctgtctcttcactcacccgggcatctgtgaccttgaactctcgcaggatatactgaggcatgttgtattctgccatcggatctaccacaaagtactggtagcgggcagagcgctcggccggccagtactggtgacacttctcctgtggaggagatggcggccgtggtcagcgctgtctgagccacagtctggccctcgcccttccctgctgtggcccctagctcacccggcccatctcccgcagcttggtcagcatcaccacgatcgtcgaattgttctcccacagcatgcgccagaagtcttccgtggtctccgccagcggcccctgtgtcgcgatgtaggccttctgctgcctgcaggcgttgggggtatgagcccagggccggcagggagacccggcgtggtactcacctgatgctgcccgggagggtcaggaccaagccagtgacagctacacctaccaccccactgcctgccaggaatggctgctgggtgcaccacttcccctcctggtgatcccattttgcatgtggggaaaccaccagtctcatgacaaattcaaatcccttgacaaagctgcgggactatccactaacctctcctgatttcttccctccatctccttcaagggccactgccctactttcagttgcttgcgtgggccaagctctcagccccgggcctttgcacatgtggcaccctctgccaggaacaccctcccctcctttgccaggatttctcaatctcagtgctattgacatttggcgctggattgttctctgagacaagctgttctgtgtactgtaggatgctgagcagcatgcctggtccccacccaggcagtaccagtagtactcatgaaaataagaaatatcctcagggtgtcagaattaccccaattgagaaccactgatagaacagatggaatcacattatggacagcagccatcagttaaacacacacccaaagattcacggacagcagccatcagttaaatatacatctaaagatgtgtatttaaacagctcagggctaccagtatctccccagctctgtctcccacaagactggaggcctcttgagagtagagatgggctccttctggggccctgaggtgggaaaggcatggcacctacctgtagccatcaatgaagctggcgttgatgtagtcagagccctccacaccccggatgggttgcagacagacccgtgtgctctcatagggcatgatgttcaccaggcggttcttgaacttgttacaaggcagattggcactgatgaagcgtgacgtgtgggccttggagttagccagccgctgtggggaggaggaagccagaggccaccatcaggatgaggaaggctatgctttcagctggagcaccaatggtggataggtaggtaggggcaccctgccaccaccttctagtccccattgctcgaggcgggcctgattttcggctctttgggcctcctccccaccccgcccacagcagcctccaccccgctggcaccttgaactcgagttccatgccagtgacgtgttcgccaggctccacctgggccagcttctggatgtaggcatagaggctgcgtgcgggcacttctgtgttgccacagcccacggcctccagcagggcctcgtggatgaagctgtactggtcctccgtctgcaccatgtagttgcgctgggacctcatgagcgtcacgtggccatagacatcgactgtcttctctggcttgatccgctcaagcatggcgtcgatgacgataaagcagcctgtgcggcccacaccggcactgcagggacagccacgtggcgttcaggggctgctgggctgcggggaccggggggaagcggatggggcagagtggggtggacgtacctgcagtgaaccacgatggggccggcatctggcgggttgcaggtcttgactctccgcaggaaagccaggaagggcgttgggtattcgggcacgccatggtccggccacgccgtaaactggaactggcggacctcgcgtttctcactggagccattctggggaccacaaggatgtcacctgtcactccggctcaacctgccacccatgtgctgaagatgcccaagtggccgggtgtggtggctcatgcctgttatcccagcactttgggaggccgaggtgggcggatcacctgaggtcaggagttcgagaccagcctgaccaacatggagaaacctcgtctcaactaaaaatacaaaattagctaggcatggtggtgcatgcctgtaatctcagctacttgggaggctgaggcaggagaattgcttgaacctgggaggtggagattgcagtgagctgagatggcgccactgtactccagcctgggtgacagagtgaaactccatctcaaaaaaaaaaacacccatgtctgcgcctcccagtcaccatgtccccaagtgcctgacttgggctctagctggccctggacggtttccaagtagagtcttgcggacgcctcacacacaacgtggccaactgtatctggccttctccccaaacctgctcccccgtcttagctgaaggtggctccaaccttctgggcactctggccacagcttgggagtcacccttaactcttcccctctcacatccaacacctcacccgggactgtcggctctgccttcaaagtctatcccaatccacctgctccatgttctccatgcaggccaatctggtctagacctatcaccaccctctttgccgcagaccttggctcccacccaagccccccagtctgtcctccctgcagcagccagagggcacctgagtcagatctggtacctcctctgcccacagccctccatggctcctgcctcccacagggtcaaagccaaagtcttccccaaggcccacaggatcctgcatgaccaggcacggtcctgccccagggcctctgcccaggctgcaccctcttacctgaaatgctgtccccccaaatctccccatcataccctcttccaggtccctaacactgtttttctcctccactttatttttctcctttgacatgtaagctttcttgacatttcatagttgtggtctgtgtcttgtctactagactgttaaatcccccaagggcagaacgttttgtctgtttaggtccctgttgtgtgcttgtgtccaggttagggagtgagatataacatatgcttaatgtataacatatgcttaatgtgtgtgattgaaccaagaattctcactcttgtccatgtactcagttttctggcacttaggtcaagcaggtgcctgacggtgagatgacctggctgggtgttggggatacatcacggtgccagtagcacctcccctccccatcatgacaataacaaatgtctcctggatggcagaattgtcctaattcagaaccacagatggagaaaaacagatggaaccgcactatggacagcagccatcagttaaatacatatctaaaagatcttctccatcccagtcctgactttgcagggctgccaatatctgtccatctctgtctggagactccttgaaggcagggctggggccctgctgaggcccccatcataggctcaagctgggtgaggccagaggacaagtgggcaaagaggacctggggcatgagtaaaggcaagaagaaatcaggctcattgctgagttgggctctgccggctttgttctcctgccgtgggtggaaacaagcagtgtcctctctgagcctcagtttccccctccacggaagtgggttccatgagaatgtagtcagcctgggtagacacgctccgctttctctctgtcccatggggagctccctgggtagaagctggggccctctgcctcccttccaacacattcctccaccctcagcccccagccccagcctgggccccaccttgtgcagagagaatgtcctgacgcagaatgtggccagctcgatggtatctagcaacgtgacctggatgaagccgtaggtctccgtgcctctgttgggccaatactgatcacacttgatctgtatcgggcaagagaacaggtgtcagcagggacaggctgactggcaggggcttgagggccgtggggtccaaggctcacccgtgacttctcctccagccgcgtcatcatgacgatggtcgccgaccgctgctcccacaccatacgccagaagtccccaaaggtctcaggcagcggcccctgcgtggcaatgtacgcgttctgacaccggtagccgtccacgtagttggcattgatgtaatcactgcccatgatgcctgcagccagggcgagaggccagggatctgtgggggctgtcttgctagtttggctctgtgtggccaaccacttcctggaagttcactctgaccgctcccagattgtccccaaggtgaccatgggacgtgtacttcacagtttctccccctcagcgccatcaccatttggggccagatcgccctctgtggcggggccattctgggcactgcagggtgctgagcagcatccctggcctccgcccactccacgccagcaacatttcttcccttcaagttgtgacaaccaaagatgtccctggacattgccagatgtcccctgggcagcaaaactgctctgattggtcacaactgatgcagaaggacagatgaagccatgttagagagagcagccatcagttaaatacatatctaaagatgcccagtggcctccagttggagctggaccaggtctatgaccagaatcaggcctcagtggcccaaggggagacatgggatctagcactttccatgcagtggggaagggcaggttaagacccgggatctccgaactaccttcaatgggctggaggatgacacgggagtggtcataggcgatgacgttggcatagcggttcttcggcttgttcacttccaggttggaatgttcccatgtgaactgctgtccagggtcgatggactacagaggaaggggagagcgcgggtgtcagggtaggtgcctgtgaggccgaggtgatgagggtgggaggcgggggtgggctcacctcatactcctgggagagcttgaggctgtcgttggccttgagccgctccgtgtgctccgccatgtctgcgatgggaattggcgggtggctaagcatgcctacagggtggagcagaccccgccggggttggtcacttggggggccagccggggactcgggggaggggggtgatctacgtgtgagtctgcgatgggtgagctgtggttagaagggcatggccggggtggggcttggcaggaggggaagactcagggtggctcatgaaggggctgggaccccaggcctaggggactctaaaggcagcaggtttgaggccctctgctccgtgcagaggctgacacccctggaggggcctggatcacagcattggcccatcctgtttccttccaaccaagctgggggtgcaggggctggcagaagggtcaccccagaggatgtcaagctcccagtgcctcgagccaagaagcaagtgtgtggcacagaaattaaattgcagacgcagccggctgtgctttggaaatactgtccttgggtgggcgactgacacccctttctgtccctctgggatcagaggcacgaaatccgcttccaggtagaggcgacagactagggaggggaaacagtatgtgtgtgtgtacgtgagaggagtgaggggtccccatctgtccctgcgcttgcttggggcaggagcaggtgcaagaaggccctggcctgagagctcttatcctttcaagccccctaggatggctgccgaaggtgctgggtgtgggctcggttctcccttcccgatatctgggtctgcagaaccctgacctctcctgggacctgtgtaccggatgttcagctctcaggtggtttccagaccagctggtaacatttaatgttctgagacttccatgtgtccctagctgtcctgggtgccccccaagagctcacatctaaggggcctgcctgtcctgtgggcacgtcctgggtacatacgtgcctcacccacatccctgacacacacatacacaccacacacacagcagtcacacacagccacctgagggcccaatggaccaaccccctgccctcttccaggagccagcacaagacaggtgggcaaaggccggtgatgggtgggcgtgtggacagagacaggagacacgatggagaaaccaaagaggaaatgaacgggggcgggggcgaaaggaagccaaaaacagacacaagaactaactttcaaagtgaaaccccggctccctgagggggctcctgaggcctgaatctgcaaacagcaaacaataaataaatgaaaacatgcagggggtaggggggggtcccacctctgcctcccccacccctcactggctggcggatgcaaagggcagagcaacgcggacaacggggggtatgtacagccacctgggcccccacctgaggactcacgatagctgctaactgtgtacccctctggctggacaccagtcaatcctggtcttgacccgtcactctggaaggactccaaagtgctaggttcttctgtctacagatcccctcccccagaccagcctggccttgggtcccctctgttgaggtcagcagagggcattctgaggaaggaggatgcaggatggtgaaggagaagctgggggagcagggaaaggacatatgggcccatgccatgagcttcaaggaggacagcaaccatcagttaaatgcacatgttgaaaatccttatttggatggaaacacaacagacatcagctagtccagagacagaaatgagatgggagcacattagcggtgaattgtgagactctgcatgatcccttcaggagactgcagccgtcagttacatgcacatttaaaattctcatttggctgaaaaaccaaagcaacacgaatcagtacagaggaaagaaagggaagagaatacacgaggggtgatacatgaggccctgcatgatccctttatgaggacagcagccatcagttaaatactaatggtcaaactcctcatttggatgaaaacagaagtgacacaagccagtccagagacaaaaaaaaagaaagtacatcaggaatggcatgtgaggctatgcatgaggctttaaggaggactaaagacatcagtgaaatacaaatgtttaaaatcttcatttggttggaaaatagagttgatatgaaccagttcagagatacgaagtggagaccgggtacagttggaaggacagatgtaacttggctgtgaacccataaggagaatagcagccatcagtaaaatgaaaaattccttatttggttagaagcagctggcatgagcccatgaagagggaggagatggtagagtttgtgaatcatacatgaaaatgatcaaggataaggccttgattcagttctcctggactgtcaggtgactttaatctacagggaactataaagaggcatgaaccctggcagccatggtgggaagaggtacagggcattgggcaggtataatttctgtaccttgctagggatatatcccaagggagtgtggaaaatggctgagggcaaacctcaactcccaccaccgaggaacattaaaaccagagacataaacagaagaatagctctttctgcccaaagaaatgaggggtttatttgtgttttctccattttttaaacatcgtctttaggctcctgaagaggacagcagccattggttaaatgttaactttaaaaaaaaaaaagcctcacttggttgtaagcagaaccaacctatgagttccaagcccagatccatgtagggttggaggtatttgggaatccagaatgtggctgcaccaagcatagttcagagggggccaatgaggggcccccagggtggcagctactgcttctccccagctatctcccctgttggtggcatccctggtaccagggataagtacatacctggagtctggaagttaatgcgtctcatttccacagggtccttggggtggtgaggggcgaggtcggcattgttcaggaggcatttggtgcggggttctgagtccttgcgtttactttaggagaagcaagcggaacagtccagttagtagtggcacatgttcatgtgtgaacacaattcaggccccaggaatgcatggtaagaaaaggaccatggacccgtatgactagggtttccaggaccaagtacagctacgtgtacaagctgtgggggcagccgggcatcccctctcctgtgggcacactatcagcccattccctgtcctcttcctcttgcctgaagcctccacgggggagggctggttcttacctgtcgggtttgctgttcccgaaagcagacacaggtgagaagggggaaaaaaagaagaaaggtgagggtgtgccggccatcaagggcttgttctgtgactctcagtgccttccttaacctctgtgagctttggtctcctctggaaaatggtgctcatatttcctgtttgtccccctgcctatcgacaccacaaggaggcttatctcagccctgggatgtgccccatggggccactacaattgctatcctcattgaactggacacaggcagcctctaccccaaatcttgctgagttgaagataggggttaagaggagaagccaagccactggcctgctttgagccctagctctgccattcccatgctgtgtgaccttgatcaagtggcttaacctctctgaacttcggtttccccatgtgtacaacagagacctttagtgatgattctctgagacaactcctccctccttttccaggaagccctccctgctgtcaagtcaagtcggggaggacatggggcttacttcttgtagagcaggatagcaatgacaatgcagattatgaagaccacggccagcacaggcccgatcacccagataagcccctcctcgccatccacgatgggctgggggtccgggttatccagctggaaggggtctgagaagggactggctgcaaaggtctgcagggaaaggaggggggtctccatcagtgtccaccctccttgtagtggccagatgggtctttctcaaacatgaacctacgtttctcccccgctctagatcctcctatattcctagaaccttgaccctggtggcctatgtgacctggtccctgccaatctttgctctccccattcccttctctgctccagccactctcctttctgtacctccagacctttgcacatgcaaatcctgggatgctttttctttgttgaactcctactcacccctcaacgccccagctccaaggtctcttcctctaagaaaccttcgtttcaggatccctccgctcccaagtcttcccctctgcccagctctgaccacagggagctgcctgtgactgaccacagaggtcagggccctggggaatggggtctgcctcattcagaggtgtgtctggatgtgggcggacaccattcaggacttacaggctcgctcttctgaagcacggcaagcacgaagaggacatagcggtggccgggctccaggccccggttatcgaagccgccatactgcttctggtcgccgggatggaacgtgggtggcagcacagagaagcgagctgcaatatagggccggggcacctccagctgacgcgagtgccgcaggctgcgcctctgtagccgtgagatgtcctggatgagctgcgggaacagagtcatgggtggctcagagctcagctgggagcaacagagcacgtgaaaactggaatgcatctgggccctgcgggttgggccccaggccctcacctcttccagatccatgtcctctgggctacccagcggggtcaggaattggcctccacgagacttgcgcagtggcaccatcacaatgaaatagctcctgtagggagatgggaaagagtcagaggggctgtcgatagggatgaccaagggatgcttcatgggggcaaacgggggaagccgtttctctgagtcttcccttctgttcatacaatgagcctattcccctatgccccatccacaaacgccacagttgctgactcaggcctccaggccttggatgatgctgtactttctgcgtagaaggcttacttcatgtaatgctcattgttaaactcctatacatccttcaaagctccagcttcaatgcccacataaccttgtagcccttaaatcttctctgcctctgaggcagagtgctcctctccccactggggactctcagctttgcctccccactagttgggaagcccagaaccaaatcctttcaggggccctagtaatacccagtggagggtcaggcatatggggtatcaggaaatgctagaagagcagacacaggacacatttagtgacaatgacccatgagaagcattgaatcttggatgaccccatgaactagggctgatagggtctgtgtttcataggcaaggaaattgaggcacagagagggcacgtggcttgccccagccatatagtaggctgatgggggtgacaaggaacccggagcatgggggtgagcatactggacaggcacggggctctggccgtcaggaagatacaccatgatgaagccgtcagcatcaggcttgggggcgacgctgggcttgccgttgagcaggttgaaggcagtccaggcggtgaccgtctgctggaggccgcccaggctgctgccgcgattggtcagcacaaagttgtagaaggtgtggggcttgaggtgcgtgatgagcttcttggtggtacggccatccacatccagtgtgagcccattgtactggatctgcggaccagggctagctcagcagggcctggtgggctcatgcccatggactgagccccagctccaggatgagtcccccaccctgactgagccctgatcccactgaatcctgccctaggcagaaatctaacactgactgatccctgatcccaggctgagtccccaactctgactgagccccaacctcactgaaccctgaccccagactgtgcctaaattccagctgagtcctgatcctaggtagaagcccactttgactgagccctgatcccatgctgaattcccagtcccgactgagccccaatcccactgaaccctgaacccagactgatcctgaattccagctgagcgctgaccctaggtggaaacccacctctgagacctgatcctagactgattcctgatctcagactgaacctcaatcccaggctgacccccgatcccagacttggcaccaactccagactaaactctgacctcaggctaagtaccaactctgagtcccaatcctgattatgcctcagtcccagctaagccatgatctaaggctgagccccaactctgatttccaatatggactaaatcttaatcccagactgaacctcaatcccagctaagccacaatccaaggctgagcccaacattgatccccaatattgactgaacctcagttccagctgatctccaatcctaggctgggccccaagtctgattcccagtattgactaagcctcaatcctagctgagacccatctctgactgagccctgatccctcacttcacaccaactccaaactgagccttaagccctgctgaactacaacccctgaccctgcctgcctgcctgcctgctggctgggcagtcgcaccttgtagggtgtgggtgagttgtagttgtcagggaactcccagctgagcagaactgatgtcttcatgatcattttcaccttgaagttcttgggcgagactgccggggaggcggccgagcagggagagagcagaagagaggccccatgagtgcctggcactgggtggcgtgaagcggggtggggtggggcggcccaggcgctccctgtcgtccgctgtgcccatgcccacggccttcctgcctggccctggcccggccctgccctgtcctgtcccaagtccctgcttcgggagacggcacgggtgcagaggctgcagaaagaaggtggaggaggaggaagaggggggaggggagcaaggggagggggcagtggtggggggcggtggtgccaccgaggcacgtcccacctttgccaacgccggagcctcggggtccggacttgccttgagtgaccacgaggaagcagaaaagtgagcacttacctgggcaggggagagggagggggctggggtgggggtgggcgcaaggcccggtccggctctggtgcaggggtcgccgcgcgcctaccttggtcccgcaggaacgtccggtagcggacgggggggctgaaggggccagggccccggcgcgtgtgggctcgcacttggaggtcataggccgtgtcgggcttcaggccctgcagcgtgagcgcgttctccgcgcccggctcagccgctgccggcagctcagtctctcgggcagggcccagggcaccggcctcccgcacggccaccgtgtatttgacgatggccccgttgcgctcggcgggcacgggtggcagccagcggagaaggacggtcccggccgaggcgttgccggccgcctccagaatctgcgggtggccacggggcgtgtcctccgggatgctcaggacctcggctgcctcctcgcccaggccgccgcggctccgggccgcaagccggaacacatacgtggcccccttgtgcacgcctgatgccgtgtagcggtcctcggagggcgggaactccagggtggccaggggcgtcgagtcctcacggccaaactgcaggcggtagcccagcacctggtcctccgcggtgccagccgggggctcccagcgtgccagcaggctgccctcgggggtctgctgcaccgacagggttgggcggcccagcactgcggggatacggggcaggtgtcagggtcccagcgccatccgccagcccagaggcacaaggtggggttgtatttttaattcttttccttcaatataacatttttttgagttggggggggtcttactctgttgcccagcctggagtgcaatggtgagatcacggctcactgcagcctcgaactcctgggctcaagtgagcttcctgcctcggcctcccaaagtgctaggattataaggccactgcacccagctgcggttgtgattttttttttttttttttttgagacagaatcttgctctgttgcccaggctgaagtgcagtagccccatctcggctcactacaagctctgcctcccgggttcaagggattctcctgcctcagcctcccgagcagctgggattacaggtacacaccaccacgcctgggtaattttgtatttttagtagagatggggtttcgccatattggccaggctggtcttgaactcctgacctcaggtgatccacccgcctcagcctcccaaagtgctgggattacaggtgtgagccaccgtgcccagcctggggttgtgatttttaaaagtggatctcaaggctgggtgtggtggctcacatctgtaagtaatcccagcactttgggaggctgagatgggcagatcatttcaggtcaggagttcgagaccagcctggccaacatggtgaaaccctgtctctactaaaaatacaaaaatgagccgggggtggtggtgcacgcctgtaatcccagctactcaggaggctgtggcaggaaaatcacttgaacccaggaggcagaggttgcagggagccaagatcgtgccactgcactccagcccgggcaacagagcaagactccgtcttaaaaataaaagtaggtctcaagaaagcctcacttaagaagcaaagacttgaaagaagaaagagagggaaccacgagaagatctgggggaatcgtgctccaggaagagggaacggcccatgcaaaggtgtagagccggcactgggctaggggcgcataaagcacagcaaggaagtgaggactcagagaacccctcctccttccattaataaggcaaccatctcctgccttgttgatttggcccttgctcaatgcaggcacctgaccaatacccatgggacataaagaaatccaaaatccgcccctgctctttgtttcgcacagcctgggtagtaatcaatgtgccgagagaggttctgggatcaggcaaagaagggggaaagctgggctgtatacatgaaaatggacttctctactgcaggacttatcagggccttgaatggactgctatgaatacccagggtggtggggagagcagcgtatgcagtggtttctgcttagcaaacacagctctaatacaatgtccctgagagaggagggaagtgccctgctggctagaagaagggagggagagatcacaggaggctgcttggaggaggtggcgttagagctggatgctggaggacgcagacaaggtgcgtgaagggaatagtgtggacaagggcaggggctgtgtccagctgggaggcctgaaaggtggggtacacagtggtgtggctacaagggtccccgaggagagggtgggtgtggggactgggatgaaggccacagaagtcagtcgattgttcctgaaacacccgagcttgttccgcccaccaccaccaccaccacgccccaccccccaagtctttttctgggctgtgccctccgcccggtgtaccctccccttacatcttcacggcagcctctttttcttaattcagctccattttggctggaaaaaaaagccagccccttggggacgatggaagggacaatggaggggctagaaggggaaactgaggcagggccaccaagagaaaggtggcttcctggtgcagtaggggaagacaggtgcaccaccctgaaataacaacctagccggggcgaccagagcctggatgggggaagcacaggagactagggggcccagaaggatcaagattatgggatgaggcaatcagggaaggctttccagggccaggtgtaccttgagctgagacctaaaggcagaagaggagccagccagcaggggaaggggtatcctggcagagggaacagcccaagtaaaggttgagagggcaaaggggtcagaggtggctgttaactgtttctgtctggtgggagccggggggacaggaagtgagtgacaaaggaggaggcaggggcggggggggccaagctgggccctggacacccacctgagcagccctcacacctttgtctcactgttccagctgcctggtgcaccctctgcctgcccttgtgagctcaaggactctggagtcacgctctggtgccagtgggggcaaaggggctgttggtgggtgggaggagggcgggttgcatacctgctcccttggtcacaaccaccttgggtttgctgcgagcgccatcgcccttcatggtgtaggcggctaccgtgatggagtacgcggtctcaggctgcaagtttgtgatgaccatctcctgcaggcacggctgggggtcagcacgacggctggggctgggagcagccccacccacccccactccccgtgctgagaacaagcaaggaggatgcagggcccggatcaggggtggagacgtgcacatgagctcatgcagagaccacgacacgtggcatggccatgctcagagggtacatgcaacaacccagccggacgagcccattgtcgcttgccaggaccaactcggtcctctctgctccgctcccctcactccttgccatcacccccgacagtctgtcctccccacagcagccagagggcgcctgtgagcactggagtcagggtccgtccccgctctccccacagccctccatggctcccacctctcttggggtcaaagcccaagtcttccctgtggctcacaaagggctctccttgctgttcctccaatgcaccaggcacagcctgcctcaggccctttggcactggccttcccccctgtctacacccactggtgtgctggaggtgcccggtaccaactcatgagagccgctggttaaattttcaggaattttgtgagccacttatgaaacagagctgttattaaaaattaaactgtacgaggctgggcgcagtggctgacgcctgtaatcccagcactttgggaggccaaggcaggaggatcacttaaggtcaggagttccagaccagcctggccaacatggtgaaacttcgtctctactaaaaataccaaaaaaaaaaaaaaaaagcaaaaaagccaggcgtggtggcacatgcctgtagtcccagctactggggtggctgaggcaggaggatcacttgaacccaggaggcggaggttgcagtgagccaacatcgtggcactgtactccagcctgggtgacagagcaagactgtctcaaaaataaataaataaactgtataaacttacaatcaactaagttatattgaaagcaaaggcaataaatacagcaaatctagttatttcactagggttactgttctctgtgggtatctgtatggttactgctttgagatcatcttgtctattgcatctgtagagtaggaatacatgattatgggctactgggcacctccccggtagcttgaaattgacatggtgggaagtatttacaccatggaaacggtccaatgctacaaaacaggactgccccctcctgcccacccagagagctgatttttactcttttatcttattgagacagggtctcaccctgtcgcccaggctggagtgcagggtgtaatcatagctcactgcagccttgacctcctgagctcaagtgatcctcccgccttagcctcccaagtagctgggaatacagacgtgcaccaccacatgcctggctaatgatgtttatattttttgtagagatgggatcttgccat[136 bp omitted]ccatccccaccacagctgtaacaatttttttttttttttttggacatagagtttcgctcttgttgcccaggctggagtgcaatggcatggtctcagctcactgcaacctctgcctccctagttcaagcaattctcctgcctcagcctcccgagtagctaggattacaggcatgcgccaccacgcctggttttgtatttttagtagagacagggtttcaccat[138 bp omitted]atgactgttagggaggaggggctcttgtcaccaccacatcctcagcatctagcacatagtaggtgctcaataagtgagtgctcgtccaatgaatgacagcacagaacactcccgggcacgcggacttgcacaacacctgtgcacacgatcacagcatcatgtgtgcccatgtctgcaagcacacacgcacccccccaagcacaggccggcatgcctgggaactgtggggtagacccaggccaaggggataaggaggggtgacggggatgcacaaacagggtctcctacccctgagcctcacagtccatccctcccagggtctctgcgagaagagcagagttgaagcccaggtgggaacattccctctagatccagtgtgggtgagagatgggaggcatcagagcatgtgggaccagtgcctgtttgtttgtttattagagacaggatcagccaggaccagtggctcatgcctgtaatcccagccactcgggaggctgagacaggagaattgtttgaacccaggaggtggaggttgcagtgagccgagatggcgccactgtactccagcccgggcgatagtgtgagactccgtctggagaaaaaaaaaaaaaaaagagacagggtctccctctgctgaccaggctggaccgcagtggtgccattttggctcactgcaacctctgcctcccaggttcaaacgattctcctgcctcagcctcccgagtagctggaattacaggtgcctgccaccacaccaggctgtttcgtattattagtagagaaggggttttgccctgttggccaggctggtcttgaactcctgacctcaggtgagccacctgcctcaacctcccaaagtgctgggactacaggcatgagccaccacgcccagccaagggaccagtgccaatttaatgtcagacctggggttctcagcagagactggtactcccgttttaggggcagagaggtagtccagagagaggtagcaacttgccccaagtcacacagcaattcctctctggtttaaagcattgtggggttgtaaccaggctatcacagacatccttccccactctggccccgctgacacctctcatcacccgggggccagaatgaagacgacagcatatccagagagaggcatttctaggccagacagggctgaattgagtgacagtaaagggtggggctgggtcaacaggagaggagacatactcacaggagaaatgactacgggcaggagaaggacccaggaggcttaagccccaccaatggcaggagccatcagggtgagaggattcagggacgaccctcaggtcctgttgctcaagccaccctcgggtctgccccctggggcgcacagtggtccgagtatcccatttccctggtgcaaacatcgaggctgggcgctccaagaggtaatgggagagcgaggggcgcatgggagggcccagaggaggagaccgttttactactgatgataaggggcgtgcaggagtcacagcacagcacggcccgcgggaagcgcacagcagtaggtgggtggccaggggcgctacttacatattcggccgtgtcatccgtctcccactgagcgcgggaggaggcggcaggggagagaggaggaaggtgagcgggggaggccagagatggagaaagagaagcagaggtggggggagcgcaagggcccgtccccgcccggagcccgtccccggccccgccccggccccccgcccacctgggcatcggccagcatgacgtccttgatgcgcggcggcccgcgggcctcggcgccctccatgcgcacgtagtggacctggtagccgcggatctggccgtgctgccggccgggcgcgggcgagcgccacagcacgcggatggccgtggcgttgagcgcctccgcctccaccttccgcggcggcgcgctgggcactggcgggcgggaggggaggggaggggcgggcggagccgttaccagggcgcccggccctgccccgggcagtgccactgtccgattccaggatgccgagtggctgccggtgaataactgggcgctcttagcgctcaccaccgggcgggaggacatggcctcctgcacaccccccacagccctgggaggggcccctgaaggtgcgccccatggatccaggctgcccccccccgagtctaaaccaccttcccagggcctccagacaccctcttcttcaccctacactgcttccatcctcatcataaccctgcaagatagggtctcctgtcattctcattttacatttggggaaattgaatcctagagagttgattctgtgatcacagccttagcaagaggcaaagccaggatttgcaccaggcagtccagctgtatgttcctaaatacccaagcaggcaggtggcccacttggcactcaggatctttttcacccaccccagggtttggcataaagaagagctgcttcatttcttctctgggcttaggacataatggggctgtccaacgaaacaaaggcaaatggctcagaaaacgaatcaggttcccaggaccaagaggctgaaatatttttgagacaggttctcttactctgtcacctaggctggcatgcagtggcaggatcacggctcactgcagctttgaactcctgggcttaagcgatcctcccacctcagcctcccaagtagctgcaactacaggcctgtgccaccatgctcagctaatacgtttttgtagagatggggtctcactctgtcacccaggctggagtgcaggggtatgatcacagctcattgcagcctcaaactgctatgcccagcaatccccgcacctcagcgtcttgagtagctgagactacatgtgcatgccaccatgcttggctatgttttaaaaatgtttttggaggaatggggtctcactatgttgcctaggctggtctcaaactccgagactcatatgatcctcctgccttggcctctcagagtgctgggattacaggcatgagccactgtgcttggccaagaagttgcaattttattgggaaaggtgtctgtcatttctctccatgatctaggcttcgaccacgtgactccaagctaggaccactgccttgctttccagcttcaaacttgctgctaacttgaaatgggtgaggacgggaacatttacaccatggaaattggccaatgctacacaaactggtctccatccacccggggagctggttaaccatgatcagcacattgttgttgcaggtgctatttgccacttcctccaccccatttccaaaggtttccactgttccaccaaaatagagggcagccagcgaaactgtccaggcacgaggctctgggagcagatgctgcagagctaagcctgcccatgtctagaatcgccaattccaaagtcaaggagccccggatttctcggggaggctgcttgcttcccgacttcctccgagtgaggcttccgccctttgaccaccagcccaggtttccagatggaaggcttcgaggcgggggccgggctggggcctgcggggggtcccgggcctggggcaggtacttaccatcctcgtcggtgcggacgaccacgggcgagctctcgggccctggtcccacctctgtgtgagcgacagtcgtgatgcggtactgggtccacttctccaaggcctccagcaggatctgagtggtggtcggggggatgccgttcacctccttgggttccgggtcctctgagcccagcggtcggtagcggacgctgtagcccaccagggccccgttgtgcgtttccggcggcggcgggcgccaacttaccaaaatggccgtggagcgcacgctgacacatttaacgtcttgagggggggctgacggttctattggagggggggagaacgtgggggggtggggaagggaggtgggatgggtggggaggggggcggggaaacaaaagatgggaaagagaaaataaaaaagaagatgataacaaacaaaacagaaccaaaccaaagagaagtcgaacccaaaagaagtgggtgtcaaccaaaggtgggatgggcgggtggatgggcgggcaggtgggatggggctgggagggctggccaagaaccctgtgctcaccaggctgcacctacgtggtgcacagtaggtcttaggcattggacagctatggtccccatgccagaaactgggtgggggaatagcaagggaagcccttcttactaggcacctactatgtgcttggcatcgtgccaaggggaatagcaacaggagctccatttattaggcacctactatgtgccagcaccaagggcttcacaaaatagtaaaagcatctatttgttgaacatctactatgtgccaggcaccatgccaaagggaacggcaacagaagctccacttattaggtacctactatgtgccagcaccaagggcttcacaaaataatagtaaaatatctatttactgaacacctactatgtgccaggcaccatgccaaggggaacagcaatagaagctccatttattaaaggcttattatgtgccaggtactgtgccaagggaaacagcaacagaagctccatttattaggcacctattatgtgccaggcaccataccaaggggaatggcagcagaagctctgtttattaggcacctcctatgtgccagcaacaagggcttcacaaatagtaaagcatctatttactcaacacctactatgtaccaggcaccatgccaaggggaacagcaatagaagctccatttattaagcacttattatgcgccaggtaccgtgccaaggggaacagcaacagaagctccatttattaggcacctactatgtgccaccataccaaggggaatggcaacagaagctccattcattaagcacctactatgtgccaggcatcatgccaaggggaatggcaacagaagccccattaggcacctactgtgtgccaggcaccatgccaaggggaatagccatagaagctccaattattaggcacctactaataattgtggtaaggcattgtgctgaggactccatagaatgatagcaaaataatctatatgtcaaacacttactatgtgccaggcaccgtggcaaggggaacagcaacagagctctattaagcacctacgatgtgccagcgccaagggcttcacaaaataacagtaaaagcatccatttattgaacacctagtatgtgcctggcgccatgccaaggggagcggcaacagaagctccatttattaagcacctactatatgccaggcaccacgccaagggaagcagcaacaaaagctccaattattgggtacctagtatgtgccaggaaccatgccaaggggaatggcaacagaagctccaattatcaggcacctactacgtgtcaagcattgtgctaaggcttcatagaatggtaacaaaataatctatgtcgaacacctatgtgccaggcaccgtggcaaggggaacagcaacagagctctattagacacctactatgtgccagcgccaagcacttcacgaaataatagtaaaagcatctatttattgaacacctactatgtgccaggtaccatgccaaggggaatggcaatagaagctccattaagcacctactacgtgccaggtaccatgccaaagggaacagcaacagaagctccatttattaactacctactatgtgccaggcactgtgccaaggggaatggcaacagaagctccattaggcacctactatgtgccagcaccaagggcttcacaaaataatagagcatctatttactgaatatctagtatgtgccacgcatcatgctaaggggaacagcaatagaagctccacttatcaggtacctactgtgtgtcaagcattgtgccaagg[131 bp omitted]tgaaactccgtctctactacaagatacaaaaaactagccgggcatggtggcgggagcctgtaatcccagctactcgggaggctgaggcaggagaatcacttgaacctgggaggcggaagttgcagtgagccaagatcgtgccactgtactccagcctgggcaacagggcaagactccatctccaaaaaaaaaaaaaaaaaaaaaaaaaaaaaaatctatatgtcacacactatgtgccaggcaacagcaatagaagccccaattattagctacctaccatgtgccaggtgtcatgccaagggcttcatacaataacagcaaatgcacttatttactggccacctactgtaggtcaggcatggtgccaagggcttcataataatttacggaaaatatggtaaaatttttcttgtagtaaaagcatttatttactgaacacttgtgctaccagggacccaaagcccatcccaaaagcttacttcaactaggaccatccaattggcctcacttgaaaataatgcccatgtcttgagcacctactgtgtgccagatagaatgtcaagggctttatcaagtaataataaaagtgcctgtttattggacacctactggtgtcaggtaccaggctcaggacttcatagctcatattgagcacctactgtgtgccaaaatctttaaagatcacagcacttctgtgttcagtcccaactatgcacctggcaccacactacatctactactaacctatcaacagcaagtctcatttattgaacatctactatggactgggtacggtaacaggtctctgaagagaaaaacagcagttgtcatttaagcagcacctactatgtgccaggcactgtgccaaaggctctctcagaaaacagtagtagtccctgcatattaaacccctactgcgtgccaggcactgtgctaagggctgtatcagaaaagttaatagtccccatgtattaggcccctactgtgtgccaggcactgtgttaaaggcttcatcagaaaacgatagtagtcaccacatattaagcacctattgtgtgccaggtgctgtgctggggcttactgaaaaacagtaagtttccacatatgaagcacctactatgtgtcaggcaactctactaagggccttacggaatgtta[137 bp omitted]gcctcccgagtagctgggactacaggcgcccgccaccac[172 bp omitted]gtgccaagcatcgtgctaagggctttattggataactgtaacagcacctggcaccgtgtgccaggcattgcactcaataccttatataaaaatagtaatagttcttattgagcacctactatttgcacacactgtgccaagggctttgcagataataagtgaatgttttcagtaaaaactgtgtaaccagccctatcccacaccctttcaaactgataatggtgcccatctgagcatctactacgtgcctcacacttaggccacctctttatagcaagtgccacttattgagcacttactgtatgtcagccattgtgccaagaggtttgcagaacaataattgttgccacccatgttttgagtacctactgtgcgcctggcactaggctaagcttgttataaactgctaatagcttccatttactgagtgccaactaggtgcccagcactgtgccaatccatatgtagatttaaaacagtggctgtattaatggggcacctactgtgtgccaggcagtatgttaaggtctttgctgaataacactgagagttcccgcatattaaagggaactgtctgtgtgttaaaggcttatgaatcagtaagtctctatgtgttgcgtgcctactatggccagacgctgtgctgagggcattagtgataataaacttcattttctgcacgcctactgcaggtgcagcaccctcagcccatgtttcatgtattatctcatttaacgcatgtatcatctcatttaatgcatgcattatctcatttaattctcacaacccctcaggtggtcagaactgtcactccccacccgccaccccgcgtcaacggtggggaaaccagattccaaagtctgcctgctgggctttctacagtcactggttgtgtaccgactgtggccagaccccaccctggaagcttttcattattttgtataacacctctcaatcttgccgaaaaaccagaagtgcagcccattttacaggtgagcccattttacaggtgaggaaactgaggctcagaaacagcaagctacctgtccaggggcatgcagtgatgaggtggcagagccaggattggaacccagacttggccgtgattcacaggctggcttggtttgaggttggcagctcagatctcagccttgtgctggttgggtatggcggaagccactctcccaagtgcccacgattttagaatctacgtcccctggagggaggcccagagagattactggccttgctcgtggcaagagcattagaaaccctcaccatcagagcagcttgcttggtggctgagcacatgtttactgagtacttactatggacactatcctgctagcatctgaaacccagagacgaatcctgtcctcagagacactgggctaccagagactgcagaggccaccccaacagcttacttcaactagagagaccctccggcctcacttaaagcaaaacattagaggcccctcctccaaaactagacaaagggaacccttccccatttcttgaccagccacaccaaccaaaggtgcccggggggtgcggggaatcaggcagggagcagggggaaaaaaaaaaaaaaaacaacaatcaaggaatgtgtcggaaggaatggatttgctgagaaagggggagaaaaaataaaaccgaaaccataataaaataagaaacaacagtgatggtgatgatgatgagaaaaacttaataaaagaaagaaagactccttccagaaaacgcccagtctggttacctaccttccactcttcaactgctaacttaaaagactttcttacgagagagggaacggccgagcgctgagctacaaggccagaccgaactcttggtgggtctcaggatgccagtggccccgcagccctgctccagcccccagcgtgcgcacgctgaggttccaggctggaggcaggaaggtggcacggtgtctggggagacccacggctgagtggtctgacctgcacctaccctgtgttcagcctaaggagcccgcagtccccggggggatggatacgcctggccctgagtctttgctgtcggttctcctgggccccacccgtctcggggcaagaagcggggagtcccttctccccaactccctgtcctgggccgccccggaggttcgcgtggctgggccgaagccgctttctaggtgaccgtgtaggtcacgtccttcacaatccggcccaacctgcatgacatctcgggaagggatgtgtgcaaagacgtggatgtgcgtgcgtgggcagcgtggcatggtggtggcacgtggtttgggagagtttctggggccgaattcgggccgtggactgtccgttcagcccagagtggctggggcaggcgggggggcacgcggggtgggccgtttttgtgaacctgcttgagaccagcgtgtactcaccttcaggacacctcagccagtctctcaggtggctgcccaagccacaggccaccctcactgactccacctcacacagacgcgcccagacgccttggagccgccaggtgctcagctcggcttggtttgtggggagcaggaaggagggaagggggccggcgggggcaggggggttgtgtctccgaggcgccccacccccccgatcccagcggctcagatgccccggctggagttgatgttaacccttcgactgatccgagatgcccctgtgtacacacacccagggcgggccttgaaggtttgaccatcatgactgattctggaagaaagcctggggtggctacgccgtgactgactgggtgaagggagggaagagggggaagcagggggaggccacgacagagagaccacgccggtggaggccacaccagggaaggccacgctgggctgagcggagccagggaggcaggtgaggtggggagacggcagaaggggcctgtccagctccgagtttagagaagtcagggagagagggtggcggtgacccacagccaactgccaggtgaagggtgactcgctccaaacagggaggccgggccggcacagcagagaactccagagatttgagccccgagtggggacctgcatgcccccacgaaacctggcctcggctccgattccaccccctccccaccctcgggaactgggacctcgtcctggggtcttgagagccaaggctccctgcccgggggaggaagaccgacggggaaggtgggttcgtctctgtgtcctttgctctgagaatgatggggtgcgagccgtgaccacagcctcacggtaccctcaaaatgcctgggaaatgggcacaacgtggcccttcaatcagcccccactccaggatggaaagaggagaaagaaggcgtggtcccagaacctctcctacaccagggccaagatcagccacttctccttgaccccaagtctcaacccgggtcaccaggcccaggggcacagacaaccccatgctgagaccctcgctgtgctgatggggatactgaggcacagcgcgggtagatggatccgaggtcggggaacaaagcggagacaggccgggaggcgccccccacccactgcagcaggccccgcctgggtccgtctgccgaggggctgtctgcggtcaggccgtggtccctcccgcagagaagggcggccccgcgagacacctactggactgcagcgtgcgctgccgcaccacgggggtgaaggcgcccaggccctgcggcgagcgggccgccaggcggaaggcgtactccgtgttgggcttcaggtcctccaccacgtaggaagtcgtcgggtcgaaggtccttcccacctgggggcagggcagagaaggacagagagggatgggggagagagagagagagacagaaacaaaggggagagagagagagacagaaacagaggggggagggggagagagagagagagagagagagacagagaaatagagacaggggtgcggcagagagggacagagagggatgagggagagaggtagaggggagagagaggtagagacagagatacagacagaaaaagagggtacggagagagacagagacggagagagacagagacagagagaaacaggggagagagtcagagacagagggacacagagacagagatagagacagagggacacagtgacagagatagagacagagaaacaaaggagagagacagacacagagacagagataaatgggagagacagagacagagagagatacagagacagacagaaacaggagagagatacagagacagaggaatagagaaattgagaaggagacagatacagagatagacacacagagacagagaaatagagacagagacagaaacacagagaaacaggggagagagacagacagaaacggaggagagagagattgagacagggacagagaaagagaggagagagagacagaaatagagatagagacagaaatagagagagaggagaaagaaacagatacagagacagagacagagagacagaaagagaggcagagggatagaaacacagagacagatggagacagaaaaaaaacacacagaaaacagagacagaaagagaaacagagacagagacataaacagacagaaacagacccggagggatggagagtgagcgtcagaggcaccggtgaagacaagacacagagagaagcacagatcaagagagatggggacgccgatacatacggaaccagagagaggccgccagcagcagaggagaaagacaaaggagatgagacagaggagaaaaaagtggaggaaaggcacaaagggacagagacgcaggagaagcagaaggggtgaggaagagcagaatccgcagcacacatagggacaaagagggggaagagacaaggcgggcagcgtcagagagcgccggggaggagcccagggcaggccagcccgtccccgcgctgcctcacctcccggccatggtcgccttcccggaagaggagctcgtacttgatgatactctcctgccgcggggggctccaggacagcgtgatgctggtctccgacctggcctcggcccgcaggttcatgggctggcccggcactgtgggggtgcagggagacaactaggagtcggggagcgtccaccccacaaagggggccccacctgctgagtgtccccactaaaagatgccagctctgggtgcttctagaatgttcttttattttcctggggacctcgcccccatcccattgtcacctgtccacctctgttcctccatcctctc[131 bp omitted]gctaacatggtgaaacctcgtctctactaaaaatacaaaaaattagccgggcgcggtggcgggcacctgtagtcccagctactcgggaggctgaggcaggagaatggtgcgaacccgggaggcggagcttgcagtcagcggagatcgcgccactgcactccagcctgggcaacagagtgagactctgtctcaaaaataaataaataaataaataaaaataaaaaaaataaaaatccccttcattttttttttttttttttgagatggagtctcactctgtcacccaggctggagtgcaatggcacgatctcggctcactgcaacctccgcctccagggttcaagtgattcacctgccttagcctcccaagtagctgggattacaggcacccgccaccacgcccggctaacttttgtatttttagtagagacgggatttcaccaattggccaggctggtctcaaactcctgacctcaactgatcctcctgcctcggcctcccaaagtgctggaattacaggcgcgaaccaccacacctggcctaaaaatctccctttcaaatcaccccagtgccctcgctggctgcgaattagatgacagagaaattagcagggagatatgtgtgcctattttatttcattttattttagtttttgaaacggggtctcactgtgtcacctaggctggagtgtagtggcacgatcatagctcactacagcctccaacttctgggctcaggtgatcctctcgcctcaccctcctaagtagctgggaccacaggcacacaccaccacactcagctaattttaaaattttttgtacacatgaggtcttgctatgttgcccaggctggtcttgaactcctggcttcaggcaaacctcctgcctcagcctcccaaagtgtcaggattacaggtgtgagccacagtgcctggcaaagggtgcctattttaacatttggatctccattctgtatccgctcacagacatggacagagtgccaaccgtcccggccctttgcttcagtgggtgcctgagtctgcccagactttaggttttgaaagcctgagccccaaaggaaagggtcaaacactcccagagagctggggtcccccatgcctaaatgcctcttccaagtcctgccacctgagcagggagggagactggcccactgccttaggggtgaggcagttttcttttatttttgagacagagtttcgctcttgttgcccagactggagtgcagtggcacgatctcagctcaccacaacctccgcttcctgggtccaagtgattcacctgcctcagcctcttgagtagctgggattacagacacacgctatcatgcccggctaattttgtatttttggtagagatggggtttcaccattattggccaggctggtcttgaactcctgacctcgtgatccacctgcctcagcctcccaacgtgctgggattacaggcgtgggccaccacgctgagccagcagttttcattatttcagaagcagtggcgctggtccctctaatgagaacagatgagggaggttcttaaaactcaaatgccaacaggggtgaggagttaacagagaagagggaaggaagcacacacagccccccttgtctcccacacagccactgggatctacccgggtgtttgatcttagccctatgggcttgtcaaatcagattttttaaagggaagccaaaaatttggctaggataactgtccaattttattttttttgagcagggtctcgctctgttgcccaggctggagggcagtggtgacattttggctcaccgcctcccgagttcaagtgattctcctgcctcagcctcctgagtagctggaactacaggcgtgtgccaccacgactggctaatttttgtattttttttttttttttagtagagatgaggttttgtcatgttggccaggctgttctcaaactcctgacctcaggtgatccacccgcctcagcctcctgaagtgctgggatcacaggcataagccaccacacccagccctctccgattttattttaatgtttgtttttgttttagagacaaggtcttgctttgttgcccaggctggagtgtagtggtgctatcatagctcactgcagctttgaactcctgggctccagtgatcctctcatctcagccttgagtagctgggactacaggtgtgcaccatcacgcctagctaatttttaattttttgtgtgtgtagagatggggtctagctacattgtccaggctggcctcaataaatcctcctatcttggcctcccaaagtgctgagattacagacatgagccactacactgggtcctatatatgtttcttaagaaatggggtattgctatattgtccaggctggactgaaactcctgggcttaagccatcctcctgcgtctgcctcttgagtagctgggactacaggcacatgccaccaagcctggctagctctctttttttttttttttaatttaatttttttgagatggcgtttcacttgtcgcccaggctggatgcaatggtgcgatcttggctcattgcaaactctgcccaggttcaagtgattctcctgcctcagcctccagagtagctgggattacaggcacccgccaccacggccggctatttttcttttgtattattaacagaaatggggtttcacggtgttggccaggctggtctcaaactcctgacctcaggtaatccactcgcctccgactcccaaaatgctggggttacaggtgtgagccaccgcctccggcctagctccccgattttaaatgctagcatgaaaatatatacatatattttttaattgtttttttgaggtggagtctcactctctcgcccaggctggagtgcagtggcatgatctcagctcactgcaacctccacctcctgggttcaagtgattctcctgcctcagcctcccgagtagctaggattacaagcacaggccaccacgcccggctaatttttagtagagatggggtttcaccatgttggccatgctggtctcgaactcctgacctccggtgacccgcccgccttggcctcccaaagtactgagattacaggcgtaaaccaccacacccggcctaaatgctagcatgaaaatatcttaaagcaccgtgcataacccacaaaccgctctgcggcttccagggagcatgcaaagaaccaagccgcacggccggggccccgagtcctgccgaccccacgcctcacctccctgctgcgtcttgacctggatggggtccgagaggggcccgtcgccgacggaggtgaaggcgagcacccgcacggtgtaggtctcgtcctccagcaggctgcccacggtggtcagcaggctgtcgtccacgttgtgcttctgccagttgcccacggggtgctccggttccatggtgtagtagacgcggtagccgcggatcaggccgttgggctccaccggctcctcccactgcacaatcatggtggtcgcgctgagcatccgggcttgcacgttccgcggcgcgctggccggggcctgctcgcctgtgcgggtgaccacggactcgctggggggcccctggccgatggagttgacggccgacacccagatctcgtactccgagttggggctcaggccgccgatgctgtaacgtgtggtggtgatgtcctctttaatctgatacggcccgtcttggctcttggatttatattcgatgacgtaataggacacaggatctgggttgcccgagtcccacgtgatggtgatgctggtggctgtgttctcagtcaccatgggagtcccgggagctttggggagagctgtgggcaggaggcagctgtgtcacgcattgggcacattggttgaggaccctgaaggctgtgtgacttttcaccattcagtcgccttctctgagccttgatttgcccagcagtaatcatgggcctcatgactcctgtcatcgtctacagcaaggggtaacaaactatggcccagggtccacccagtacccattttctttttttaatttttctttgagatggagtctcactctgtcacccacagtggcacgatctcggctcactgcaagctccgtctcccgggttcacacaattctcctgcctcagcctcccgagtagctgggacgacaggcgcctgcca[138 bp omitted]cccggccttttttttcttttttctttttttttttttttagacggagccttgctctgtcacccaggctggagtgcaatggctcgatcttggctcactgcaacctccacctcccgggttcaagtgattctcctgcctcagcctcccgagtagctgggattacagatgtgcgccaccacgcccagctaatttttttttttttttgtattttcagtagagacagggtttcaccat[140 bp omitted]aggctggactgcagtagtgcgatcatagctcactgcagccttgaactcctgggctcaagcagtcctcctgcctcagcctcctgagtagctgggactaaaggcatgcaccactgcacttggctaaatgtttcatttttttgtggtagagaaggggcctggctat[132 bp omitted]aaagaacaaccgtccccttcctagccatgaatgactgaagccaagagggtaactcggaggtgctcccacgctgcctcccacctgtgcctgaagtcggggatcgactccagcctgcccctccacctacgagccccatgggccctgctcacatttcaccgtgatctgagcaaccgcctcaatgacgcccaggctggacatggccacgcaggtgtagttggccgagtccttgacatctgtgagttccagcacgttccgacccacgggcatgtcatcctcgggggtcaggtcctcggccccctgcatccacttcacgtatggcatgggcgagcccacggccacgcaggtgatgttcacgttgccccctggcatgatctcgtggctcatgggcaggatggagaagcgcggggccacgcggcggactggggagggggcggcagtggcggcgggagggagatgcgaggggtgaggtggggtgaggttgggaggggaagacaggatgcggaggagaaaaagaaaagcaggaaggaagaaagaaagaaggaaagaaagaaaaaaagaaaaaaaaaggaaaaccatttaaatataaacagggctggttcttttccctctgttgatttttttcccccaaatgaaaagaaaacaaaagaaccaaattaaaaaaccaaattccaacacaaagaaaccaaaacttcaaaggaaggtacttcacaaacaatatatagagagatatatcaatatataatagacatgaagcattatctcatagcaacagggtttcatagaccagggtggctggtcacagcacagatacgaacacaaaaatttatcagcggtttctcatctttgcagacagcagtggcttcagggagcaggtggcctccgatcactcccgaatgggggcatccccttcggggagcgctggaagattctggctgccaagtttcgggatgtgagtgggttaggagagggggcaacttccaaccctccctggttctctggggatgtggcggtcataggacacttgttgaggccaggagacagagggagcctgagatgtcagtcccccactccccagtgacctggggccctgcccacttacccgccccctccgaccgggccctccaggaaaagatgagaaactctaatgaaatttttgtggtttttgggtatagaaacccttctaaaagcttctgtcagatctgacaagtttccatcaatagatgcagctctgagtcacaaacatcatgcaaaatagattgagagagagagagagagagaaagagagagcgagcgagagacagagagagaaaggagggaggaactgcagggggaagatctggattttggggatctctagtgcacacttacgtgacaccagagagaggagacgaatgaatggggagaaagagagaagaatagaaaatagggacagagagcgggaggggcagagaaagaaagaaagaagggggggcccacttcaatgctgcatattaattctagcagatgtgatccaatgtgacatgccacattgtcacatcacagccctggcagaataataaatagtatattaataataataataataataataattaataataataaacaagggaatgaacttgaacgttgagagaacagggacatgttctgtgcgtttcttagcggggaagtggatgcaaccttctctcaaagaccatgaaggcagcaggatgcatttcgggggctccgttttcggaagtcagatgggttccaggacagggggaaggggaggaggccagtgggcacctgaacttgcaaagagcactgctggcccacgggggctgtttaactgctgtgggaaggactcgggtgaacctaataaatccttctagcaggaaaaggggttgtccctgggtgacagtctcaggtcctaaagaagacacatgggtgcgtccccagctttggatgggtgaaggagtcttgtttcaactgcacagatgacggactggaggctcagttaggatccccatcaacacctgcctctgattttcatacgggattgggaggtgcagcctcagggggtggtctcagggggtctggtctacgatgctgaggaggaggttcaaggggataaagggaggtggccccaactccctcccttccagcctcggttcctagctggaaatcccaacccctgccttcctgaatccgggcgggaggcaaagagaaggggggacgtcggcaggcgtgggagtggggtccggaagctggcagcccttcggaaaaagaagccccacgaaaagtccagaagtcgcactggagacaggatggagggagtggagggtactgctccaggggaggagtcggggcatggggagacagaagggccatgcacacagagtggaggtgaggggcgaggtgccgtgagatggggggggcgggtggctttctggtagggctgggtggagggtgggggtgtggggggagaatggggtccggccagccagcggacgcggtccaggccagccgccggcacccacagcgaggcacaggtaagatgccaaggctgagttgtcatggaaacagaacacaatggggaaatgagcgtggggggagctaattattcaaggacagaaaaacggtatcgacgtccaaaacaaaaccaggaagaacaaatgaaataacaaagcaaaagcaatttaaaaaaagaaagagagaatctaaaaaacaaacaaacgaaaaaactccctccaaaacaaaacacaacacccaaaagcaagaagaaaaaaaaaaaaatcatggaatgggtgtggggctgaaaatcggggtctgaaaggaggaggactgtggcttccccagggagacgccctccccctggcagaacacaggatccggcctccccatccagcacccaagagtcttggccacgggtttggggcggccacaggggtgggagcctcgtggacaaaaatccttcggaacaaaccaacccagcccgactcaagtctctctctctaaagcccctctcagtccacttctcgacaccctgcctctcttagggctgagcaagttggaggtcccaaagctgaaatcacaaagcaaggtgaactcctcaaggtctctgaatcccatagtaaacctctccaggcagacgtggaggagctgatgtggctgaatgagcccagtggccttgggaaggtcccccatcctcctggagcctcagtttcctcatctgtaaaatggagggaattgggtatcctgccgagaaaggcattaacctgactcgggcagtgcctggcacagcaggtgctaaactcaggcatggagctggtgaagttacctttcagcctcccaggggctgggacgatcaaacagcttctctaccttaagggagttcagggatgaattataaaaaggaaatggaggcaggcgcagtggctcatgcctgtgatcccagcactttgggaggctgtggcaggtggatcacctgagatcaagagttggagaccagcctggccaacatggcaaaatcccatctctactaaaaatacaaaaattagccaggcgtggcggcgggcgcctgtaatcccagttactctggaggctgaggcaggagaactgccggaacccgggaggcagaggttgcagtgaactgagatcgtgccaccgcactccagcctgggtgacagagcgagactccatctccaaataaataaataaataaacaaacaaacaaacaaacgaaatggaaacagtaagaatttctactgaattcccatcttatttcttccttctaacaattttgagaggcaaacgtccttatgctcattttgcagatgagggaacagagactcagagaggtgacaagactagatggaactcacagaaaggaagtagtgtagccagagctcaaagccaggccagcctggttgctgcctctcagagaaaacaaggcttttctcaccatagtgagtaacgaggattacggccaagtatcaatccttggcatctagctctttcaaacttgtgtgtcctgacccactggggacaccaaagaggaaaaaagtacccatcacctataccaaactccatgtaatggccagttgccactggttgaataatatccagtagccatcataataaatgtccagaagccatcagtaaaaggcttatactcaaaggaattgttggaacgtcaaagggagtaagatctagctttaggatctaaaggttaagtgccaggccaatttatctattctgtaagggtcaacatcttatccaaaagaccctgttcctgtttgatcttatcttaaaatatctctccatagggatgtcataatttgcaaggtacctttaactttttttagaagtagagacaaggggatacctgttgaatatgtaaaagacttgcagtacagggttaactataaatcagtttaatgtgggagggcatttatcaacagcagtaattttagggttcacaatccccaacatggccggcaaccatcagttaaatggacctgccaataaattataatggctcctctgacacctaagaaacttgcccacttgctttctcacccgcctcatttgtttcaaagggtgtgctctaggaagagggctggtttgccacgagtttaagggaggatcatgcccattggcactaggtggttcagatctccccctccctggcggccttgtaaggcctctgggcatcctcccagctggcaagggcgggtgactgacgctgtgttctgcccggtttggtgctggcacccacccatgtcatctttccacccccggctgcaagcttgaggtgcaggttagaaagtaaggtgggcacggtgcccacgggacggagaggccccgcgggacccccgcccccaattaccgacctgaatggagggtccaggcaggttataaggggaccacaccagccttggtcctcagcacgctccagctggctctggtttccagctcttctcgtcaccgagtagccggggggtcccagcggggggacccgcttgggcgagggggtcgggagggtgggcggtggggtgggggggtggcaggttgtggggggtggtcgcttcaaaccccgattcacatggaaaaacaactcaaaaaccgtcaaagcaaccaggagacgacccctcccccaggcaggaagaggcagaaacacaaaaaccaaaaaagggggttgggagtgggggcgagggtaaaggggaggaaggaaactcaaaagtgaggtgatctggttgaagcactaggtagggaaccccgacagtgtcagacatctcaacgattcagcaagccgcagctccaaggggtgcgggggcggcgggggggggggggggggctctgctgggcattttggggtgggagaagattctagatacttctccaaactccaaaatgaatatgcggatggagagggcaggggagagatgccaagaaattgtgcagcctccggggggtttatttaagcttagattacacctgtcgggggggaagggaggggttggaaacattcctaattccatagcccacttcttgtcctctcctttgaactccagcctgtagcccaaggagggtgggcaccgcccctcagcccacctgcgtattttctgctacccttctccatcattttgctgtgcctccttccctccctcccgcctctcccccccaccgccagctccctccgccactgaggtagcgtgcaaggcccggagggacctggctggctccctggcccacgggctgaccagcggccttggcaagtcattggtattttgagctggacctttggatgcgctctagatacttttttttttttttttggtacccgctctctctttctctcatttctttttgtttttcccccagttctggccaatccatggacttccctcaccacccccccaacctcgctgtggccgccggagacacggggctttccaaatgacaaggtgtaatctaatattcccctcacaaaccccctcccccaacagaggaaacagcgaatgcagagggtgtgaggcaggcagcaggcgagaggtgttcagagctcagtgttcctgcagagtgaccccctcctcgccgcccaccctggccaaatggagggacgcctgccttcccgcccctggagtcccctctccccgatgtgatgagggtgggatgagaaggtctgggtctgatctaacactgcctgcccctagggttaagccagcggccttaggtagggaggcgtggccaggtatagtaagcacaaactagggagctggccaacacacctcaacgcgaggctttctgggaatacaggaggtgaggggtgttccagcccaccatctatgtctgtccctgttttggggggccaagaggtaaggggaacacctggggtcacatccatcaattttagggcttgggtattggaaatttaatttaaaaaacaatttttccccataaatttgcatagatggattgatctgaaaaggcctggggacaggtcacaaatactgaaaaagaagacctgggaatcgggcaatctaggccttgctggtgtcacgcagcaggtactggtttcttagcttagcactcaagactctgcgttaaattatgccagtcccatcggcctcttccaaaaccttgaagatatcctcagacccttcaaggtagaacattgctcaaccggcagggcacggtggctcactcctgcaatcccagcactttgggaggctgaggtgggtgaatcacctgaggtcaggagtttgagaccagcctggccaacatggtgaaaccctgtctctaccagaaatacaaaaattatctgagcgtggtgccaggtgcctgtaatcccagctactcaggggactgaggcaggagaatcacttgaacccaggaggcggaggttgcagtgagccgagattgcgccactgtacttcagcctgggcaacacagtgagattctgtcaaaaaaaaaaaaaaaaaaaaaaaggccgagtgtggtggctcacacctgtaatcccagcacttttggaggccgaggcaggtagattacctgaggtcaggagaccagcctggccaacatggcaaaaccctgtctctaataaaaatacaaaaattagccaggcgtggtggagggcaactgtaatcccagctacttgggaggctgagacaggagaatcattgaacccaggaggaggaggttgcagtgagccgagatcacgtcaatgcactccagcctgagtgacaagagtgaaactccatctcaaaaaaaaaaaaaaaaaaaaaaagtaaaagaaaaagaaaattcctcctgatgtctccagctttttccaagttcccctggcatcagagggtggcaaaccatttacatgggtcctgtgcactacgtttcaataatgctatgttgcaagaccaggcagtaaagacactacctttagccactaactcatactctaaaggcttagagttttaaagaaccagaaaagaacattcatagtcagggagaatataatctgatcatcttcccaccttgtcaaaagtcggaggagggagaattcaactacagctgggagtggagctgccagctgtatttttaaaaatggacacattttgacttaagccctttggatcccagagataaatttcaggaggagaagggcaagcctgaatattttaccccctgtaccacccagagtcagccaaagctggagatctgtcagtttagaaaataaataagagtgagattaggggttgcattttttcccctttttgcaattaattcctgtgactggctgctctggcaacaatgtaaatacttgtagctttcagaacatgccaggtagcccatctcttctggtgggctggtacttatctgcaagggtagccttgtacttaatatgggcctttgttgtccctttctgtggccacagaacttcctaggaaatgacagtggggaaaatgagagctatggctctgggtagtccgctgatctcatggggatggggctggagccaggagaaaatgagatcatgagatgagctcaggaaagcactagcgaaaaatgaggtctgagcaaatgaattagcttctgccctacaattatttttaaaagtttcccatatgccatcttattcaaacagtggacatgtgaagtacataacagggaaactaagacccacaaagaagggaagtgacttgcccagatcatttgcttgaatcctttatttacaacaatcctactgggaatgcttgttacacagagcacttagttcaatgaaatcctttcacctaccctgtgatcaaggttcatttatgatctctactgttcagatgaggaagtggggactccaagtggtcaaatgactagttcaaggtcacgtagccagggaggggcacagacaaaactggaatccaggtctgccagagtccagagcctatgctctcatcactttctgggctgtactgcccagaaagtccaagtggtcttcagagaccctctgttcactcagttccaatgcaccagcacctagctttggtggaggggctgggagacccctttctgccatcttttggcactgctctgagggtcagcctggcagctcgcatgctgggttaataagcaaatcttactgcatctaaagtcctcttgccaacttggtccaggatttaataattggtaagtttggagaaggtgagtgagggacaagagggggaaaaggtgattccaaagtctggcttctgtcctcaacatcgtctaaacggggtagtcagctggggttggtggttaaaaatctacacggatattttattggggggtgttttttattgggggttggagtaagactctcaagggcgtgccttttcttggggaggggagcagaagatgggggtgtgcatctctgaagatttgcaagagtgagagacacacagagagaaagagagttgaaaaagagaaagagaagcagagggagagttggggaggcagagagagcaggggagaggctgtgtccaaggttcccctgggctttttccagaattccacagctctgatgctcaggtactcagaaagtgaccatgctgtgttgctggacaaaagacgcctgtgaccgggctcagagtctgagaggggatgggggaagcagccagtgctgcctgggaggcagaggcatagtgttccaggtcagataattggccaagtctttcttccaaagtctgtcaggctacatttcctaatgggcacttctggattggtacccagccagaatgcatacagtcatcacagcagctgccattttgagtgccaattacacaccgagtatgcatggtcctgtgaaaatggtgctgttattgtcctctcccctcatttaaaactgaccataatccatgtttggatatgtcactaaaatgaataagaactcaaaatgctagtgcacattcagcagtacttcaaatgcctgggtttgggcttatttgggagcgcaggaggcagtctcattctgaggtagaaggatgggaacatgcctgcttaagcttccttccaacatggctgcctggaggcagggagctgagttactacctctggggaaagaggagctggccagtgaggtcaggaaaattgggctgctctctccacacaccccacccatgttctgacctcctgccatctgtctgtgccacctcccttgtgcccttgtgcctaagtggtcactttctgccctggcatcccagctgtgggaccccttctgccctcctggatgatagctgggacaggaacactggcttttaaatcacaatgcgtttggagaacaaccacagaacagctcaacccaagaaaccaaaaccaaatagcacagacacaagacagaaccaaagacgagtcgctttgggggagaagaggaccaggtgaagggaatgggaggggaaaaaagaaccatttgattttttccccccaaaacgaaacaaaaccaaagaaaaaaagaaaaaagaaaaaaaaaagaaaaaggaaaaaagaaaaccaaaagagaaaaacagaacagaagacgagaaacactccaacagaaggcgttgggaattcaccaaaccaaaccgacaagagaggcatgcagagaaatttttacattctcccagcatgcatcaggcccaagttaccatgacgacgaggagtgcaaaaaacttagcaacaacattaccaacggatgcagaggcgaccataatgcaagcatcgcatgtgtgcggccggccctaggccgggctgggcgcggctgagattttcgtgtctttctgggttttgcgctcgcttggcggttttttgtttagtttgctttgtgcttatgattcatattccatcttttaaaattgttgttcatttttctattttttttccgtgtgtgtgtcagcgtgtgtccgtgtggtgtctacatgtgttttgtgtgtgtgcgtgtcattttcagaatgtaaaaatgtgggtaaagaaagtaaaaaagaaaaaaacacaccaaccttctcgaagctctgagggatgtaaagggggtttgatgcagaacacaatgacatgggaagaagagaaaaaataggggagatacagagagtaaaaagaggacttcccaaggctaaaagctgcaatagtttgttgttttttttttctttaaaccaaaaaaaaaaattaaaattaaaaaataaaaagaacagcaatgacctttttgtcttctctccactctgccctcaacatacaagatctactacatttgcctttctccattcttttctaagcttgattctggagcatctaagacccaggcaaagatggggaaacagaacctcaccccctcaactgtccccaagaggatggaggctcatgctggggaccccacctctgggggatgaggacacagaagcccccctcccttcttgcaccctcactaaaggccccacccggctccctgccccacacccgctgtccacactcttttgagccctgctggatttacaaacccccatcccaggtgttggcagagaaataagcaggttaggtgaagaccagtcagttggagtcacgaacgcattacaactcaccagaggtgccgtgacagtggatcagacgtgcccctacccaccacccgtccatacacccacatccccatcccctccccctccatgcgacctcctcctcagagacaaaatgcaaaaccccaggtccaggaccaaggaatcacttcagggccagcgggtgctgtggatggtagggacgaaggtggtgagtgagggtctgtgggtaagggatgagccacacggcctcctggatggagaacaactagggcttggtacttcgcatgggggaaactgaggcccagagaaggatgtgattgagtcaattacacagcgctaactggggcagccctagggattgaagggcgccctggcatcctggcagaagctgtttctaccacaaatctgatcagaaacagcgactaggaggtgaaagggaggaggaggaggaagactacaacttctgaaaagacccaagagccaacacacgagataagaggaggccaacggaggcatctgggggcaagggagccccctggcacctttgaggcagcaccaagggacccacaaggaagtaagcttccttggggcaggggagcggggaggtgctggggcgaggcccccacgctgctgggcatgactgagtgggaattggaaactgagagtaacaagcttcgctgggtgccgtgcctgccccagctcggtgcaactaccgagccccccgggtgcctgtgcccgctgtggctccagcctcccatcggcctggactgcccttctcggagagtcattaggaagaggcagaaggcgccgggctccggaccagctggtggggggtgggaggggcagcctcgaagacccctcctcaacttctagattgagggccctggattagggggggcagtgaagcggggagctacgaggccacaaagttgggagaagcaaagccagcacacagcacgggaaggcacgacacaccacagaagccaactcgggtgggcaggcaggtggggtggggcggggcagaggcctgcaggctcccctggccctgtaggcccaagactgaccccctcaccctgccccacgccttcctaccccaccatcactgcctccccagagcctgctgcccacggggcatctctcgcaaggcacgaggaagggaatttaagctgcccccattctacaggcaaggaaactaaggcccagagagggacgccgcctcggccaaggtcccaccgcgaccggggaggggccttcctgcttgggtgtgcaggggacgggggagcccggaggcggtgagcccgaggagggagggggatgggacggggcgggtccctgcctttgacctggacgcggcgttccctacctcgcacgtagaggttggcaggtgaggagtagcgcacgccggcgctgttggtggccacacactcatatttgccctggtcggtttcctcactgctttcaatctgcagggctcctgtgggaagatgggaaaaagcttggtctgttagaggggggcccaggagtgaacagggaaagctcccccaccagagtgctctctggcctgtctcctgtgctggctgggccagagaggcagataagaggtgagaaaacctggaagccctagcttggccaggccttgtataacctccacccccacatctagccccaccagggcctggacacaccagattccccagcaaattctccactcacagtggaaaagcagctggtcatgagactgctgcctcatgactgccaagttgaattacaaagatggagaaaagtgtgtttgagaaagcactaagtgatgctctcctggccagaaggaaagagtgggttggcattcacaactcataaccatcatttgatagatccagggacctgagggggcccaccacaaatcatgtgaaaattcagggagctggtggttgctttgtttcattaggtgcccgtgagtaaatgaacatgggtctgggttcctcagttgtgtttggaatcctagtcctcaaagtcctcaacgcccctaagtaaatggagacggggttgtacttcttcaggtgtgtttgaaatttcaggattaggttataccctgaggcagctaaagtaaaaaaacgttgatgctggtgtgtatcaagtatgtttgagatcaaagccatggatccaagccttctggcctgaaactgattgaagagaagtcagaatttccccaagtattttaagtcatctaaataaaagtctgaatttacctgcttgtatttaaaaccacaagcctgaagtcaacatcctggtgctcacgagtaactgaatggacttcttcaagtgtgtttgaaattatggtcctagacccaattctatgatgctcataggtacccaggattagattaaattttcaaaagtgtttgaaatcaggggtctgattgaaagcctctcatactcacaagtaaagttgaggctaaaatgccccaagcctggatcaaagaatttgttggtcatgagtaaataaagatacaaagaagagggcaatttttcaagcatatttaaaaccacaggcccaaatccaaggtcttggtgctcatgagtagatgaaaataggactgatttcccctcaatacatttgaaatcacagacccaaatcaaagacttcactttccatgaacctataaaaatgaatgaaccttctcaagaatatctgaaatcacaggccttgatcaaacactactgtgcccatgagaaaatgaaaacgaggccaagatttccccaaagatatctgaaaccacatgcctgaaacaagtccctcattttcaccagtaaatgaagctgagtatatctgaaattataggccttgataaaaacttgagtgcccacaaataaaaaataaggcaaaagtttccacacgtatgtttgtaatcacaggcctggatcaaagtccttattttcataagtaaataaaacttagtgtaacatatctaagtatgtttgaatcacaggcctggacccaagtgcctgtcgaccatgagtaaatgaagatgagtgaatatccccaaatgtgtttgaatcacaggcttcaatcacagcctatggcaccaggggtccaaaaatccagactgagctttccagccttgtttgtgactatcccacagaaatgacatggacccacagattgggggattctctctggaggtcatggataaagactccgtccccatagagcactgcctattctccctggacctcgaggttctgggaagcaggcagtatctccatcactaaggaggcccagagagggtcaggagactgctctaggtcacacagcatttgtagcaaaggtagggctggacactgattcttccccaggttcccactcaggccttctcttggctcttctctgaggcaaaagttgggtagggggaaagggatggagccgaccgacctgagagtgcatgtctctatgtgtccttgggttagaacctccagatcagaaagaactgtggagctggaaggcccactttgcatgttcgttttgtttctttttttttttttttttgaggagtctcattctgtcacccaggctggagtgcagtggcatgatcttagtggctcactgcaacctctgcctcccaggttcaagtgattctcctgcctcagcctcctgagtagctgggattacaggcgcccaccaccatgcccggctaatttttgtgtttttagtagagatggggtttgaccatgctgcccaggctggtcttgaactcctgacctcaggtgattcacctgcctcggcctcccacagtgctgggattacaggcgtgaaccaccgcgcccggcctgcatgctcattttagaggtggctaaaccacatggggctcccagcactctgggggtcttgccaggtagggtccttcccagagggggagagagcgcccccgccttccacagccaggtgacctgaggagtcacctcggccacattcagccccctggccacagacacagacacagacgcagagaccggactaacactgggtggaacaaaggtggtggcagggtggacacgcatggaagggggcctgggggcaggccctgtggagcctgaggggctgagtgggcagcaagagcgagcgtgagtgggtgggtgagtgaggagcctcttacctcgaatcggagtgctttctgtaagggaagcagagagaaccaggtgaatgtcacaaggcggttgttggggggccggggggccccagggaagctgggctgggccgtaagccaggcctcagcactctgccccagggaggggatcgagccagccctgggcatacggaccctgcgggctttgctgaggaagctaggagaggcctcctaggagcagggtgaggtctgagggcttgtcaaagcaggagggtttcctgtagaaggcgggaatctctgggggtggagggatggagtctagaagcctctctggatgggtgaggggcgtctctatgcccagggaaggtctgtcagcctggccctttggtggccttccctctgggctgagggagggaggttcatcacccccccttccttctttccgtcttagggagcccagcaagagactgctttcaagtccagactaggaggggacaaggagcaacaggaattatcttgttagagacaggggaggtgggtggggttagtgccccagtgccgggcattaatacagccaaggaagggtgtcacagacaggccgagtaggagggacagggagagcctggcagccttcttaccaagaggaaaagaggaaagacctgtttatctgggccttggaggcagggatggttaactgcaaagcaggaaaaggcggctcggggctggaacgttactccctctgctcatgatccagggagaagttttgggcccccttctctctgctgctgatggccgataacttgataactcggctggctggggccaagaagatcccaagacctcgatctgccaggagtggccagacacgtgaaaaagcagctccttctgcgtggcccaaacccattttgcagacgggccaactgaggctcagaggggaatctctgaggtcccatcatgaggcaggggtgggcactgagcctagctctccagcctcctgggatgaggagcttctggcctgaacttttcggagtccctgaattatctttcgaggtgttctcgtgaggccactctgcaccctttagaggggagcaaacagaagtttgcctaaagttacaccctggagaactggaatccgagtcagcggaaatccaggctggcctttgctaggacactgggatgacgatggtggaagtcagggttaaagaaagtcttttcaggccgggcgtggtggctcacgcctgtaatcctagcactttgggaagccgag[134 bp omitted]gaggcaggagaattgcttgaatcggggacgtggaggctttagtgagccgagatggtgccactgcactccagcctgggtgacagattaagactgtctcaaaaaaaaagaagtcttttcaagttggccaaatcactcagggctattctatcaagtggaaacaatgtatcccttagccattaaaaggtgttccgcctcccaccctgagagagatgaagggactgatagcataggctgatatcagtcactctcactttagtatgaattagtcccacaactgatttcaggagattcaggctgaatgctgagaaaagtggatgagaagtgcccagtagcagctaggctggaaaaatctccactccacgcccagccccagcccccaaacttctgtaattaaatccttttccagcagggctaaggccaagaaaaaagtgcgggaggaaatgttgttaggtgcgaagttccatgagcccgaggatgcctctgaacccccctcagcctgcattttgaggtctgcctggccttgtctcttttcctcttttcctttgggtggacttgtctcttttcctcttttcctttgggtttctttctctgccgcacactagtgccagctggggagggctgaggggccggtcgcggggaggagggagagggcgttagtaaacataccaggcagagtgggtcacagttaccatcacggtggctgttagtttggtgaggagaaggggagcagaaggggcacaaaggggatggggcgttagttgttgacgtggtgatgaaatcagacttaccaaaggtttctgaacgtttacaacaggaggataagaaaagagaacaggaacgttaacgggtggttacaaagaatcctatgtcctcagcgaggaggggagggcgggggaggggagggggacgctcagaataataataacaacatttcttatgattcctaaagtggcttatgttcactgagcacctagcaggcgctagacattccatcctggagaggtcaccagaacacaaggaaaataggcatgttttatggggaaactgaggccaccgctccccctgcttgcagaggcctatgagctgcaaacatcctcagccaggctgggagataggaggcgatttgtccccccagtgtgaggtctgagtctctccaaggaagacattctgggctccacgtctgatctttttggggcttggttttcactaaggaggaggagcagaaagcggagaacaggtaggtaggctctttggtggggggcaacgatgggcagtgagtgaggggcgctggggatgattcggggaggtactgctgcaaagggggctccgtggcgggatcctcggaggaaggggagagagaaagcaaaaagaggggtgtgtggaggtgcagggtgatctcaacagtgacctgaacgaaggcagggcgtcaagcccggcacaactgaaaacagtaaatccgtgacacagacaaacacgcatgtgcagccacacgtgtgctcccaatgtatggagacacatccccaccacgtgtgtccccacgcacgagcactagggaggtgcaggctgagaggcgcgtgcgcggatcactgccctgtgtgcacaggcacgggagtgactgcaatgtgggtgcacgtgtggccgagatgcaggcggacactttgctccgggcgggggaagggaggcccgtgtgtgacagcagccaggcctgcacacctgtgcccacaggcgggaggcaggccaggccggcacagggagcccagacatgcacacgtggacatgtcgtgaagcggggggacaacacacacgcagacacagccccccagacagatggacccacagatgggccatgtgggtgctttgtggagacacaatggtggaaccacccgtctccaaggctctgtcccaaggtctccctagcccagccagggcctgaacagacaggctggactgcccgtctgtgcccccttacagacctgaagccccgccatcacctcttactgctcagccttggagagactctctccctgtagttttctatggctccccatcaccttacttgtcacctctggacacctgccattgccttacacagcttccactactcctgcctgtctgggccccactgtattctcactggacgtgcctaatgcttctgtagaggatgctctctgccaccttccatagctccctattacatacccattgaagctggtctccccttgtcaccctccatggctcactgacacttctgcctgtctgtctcccattgcttgggcactgccgatacccaccatccttggcggctttctttcttttcagagatgagcgtcttgctacattgcccatgctggtctcaaactcctggcctcaagcaagccttctgccttggcctcccaaagagctcggattacaggcataagccactgcgcccagccccctcagtggcttcctatcacccacaactgtctgtgggtgacagctgtgatctcactgcctgagcatgggagacactctccccgcccatggccctatataactccccatccttgtgcatgtctgcatccattatatcttcattggccaggtgttgaagcactattcttctaccaccctctatagctctccagtactcatgcccatctgtgccccctaatatcctcagtgtgcggctttgaagacatttgcccccactcccccagagccaacgcctgccacggccacacactgtctctgtctgtcctccagtagtccccagaacttgggccctggagatgctccccaccccctgctgccctccaaggctcccacgtcctgtcagccaccctcactcacctgatcgcagctgtttgatgcgtccattgctggcactaggatccacaggcaggaagtccttgaaccaggtgatctcagggtcagggttgccgctggctgcacagagcatggtggctgtccgtgtccgctccaccaccttcaactgtgggcccatgtcgatgttggggaagccagagggcagctggtcctctgagggcagagacgtgagagaaatgggcatggttctgagcactgcacagccactcctgagcctggggctcagggactgcctggccacgggtccagctcctccctggctgcgtgacctcagccatgggtgccatcctttacagccagttctctctctttttttgagacagggtcttgctctgttgcccaggctggagtacagtggctcgatcatagctcaccgcagtctcaacaacctgggctcaagtgatcctcctgcctcagcctcctgagtagccgggactacaagcatgcgccaccacgcctggctaatttttaaaatttttgtagagagggggtctcgctgtgttgtccaggcgggtctcaaactcctggccccaagcaatcctcccacttctgcctcccaaagcactgggattgcaggcatgagccactgcacctggttgggtccctcttctgtacaagggggaggctggtgtcagggagctgagccaggtagaatgatatttctcactggggggtgactctgctgccctgggagacactgggcgatgtctggggatatctgaggttgtcacaacttgggggtcaggacttgggggtgggtgctcctggaatggactgggtggggctgagagatgctctacaccctactacatataagcacaaacctggccccaaggtccacagtgctgagtgggttcatttacagcagcctgaggacgcctttctttttatcttttaaaaaatt[131 bp omitted]ggtgaaacactgtctccattaaaaacaaaaactagccgggcatgatggtgcatgcttgtaatcccagctacccgggagactgaggcagaaaaatcacttgaacccgggagacggaggttgtggtgagccaagatcacgccactgcactctagcctgggcgacagagtgagactcggtctcaaaaaaaatcaaactaaaaataaaaataaaataaataaaatatagagatagggtctcaccatgttgcccagattggtctcgacctcctgggctcaaggaatcctcccaccttgacctcccaaagcattgggattacaggtattttacaggtatgagccactgtgcctggcccagaggacaccgtttttattttttatttatttattttttttgagatggagtctcactcgtcggccaggctggaaggcagtggcatgcactccacgcccggctaatttttgtacttttagtagagaaggggttttgccatgttggccaggctggtctcgaactcctgacctcatcatccacctgccgtggcctcccaaagtgcctggattacaggtgtgagccacagccccacctgcctttctaaacataaaccacactgctcccccgctgtacacccttctgtggtccggccaccctcagaaggaaccctgcctgcttgcccgctgctggcccctgccaccttccctcctctttttctctctggcccagtcaccctggcctccacggctctcaaagtcatcaagccccctccctcgggtcacctgttctgttccctcagcctggaatccccgttcccacatctgtctactgatcggaacaccacctgggactagctccaactcccttgctctaaatgcccccacactcctcactctcctctgcagcagggaattctatctgtaacggtgcatctgtgtcaccacagcatccgtagcacccagcgcagaaccgggcatacagtaggagctcaatcaatgaacaaacaactcaatcctggttgagcactcaatcctccagcaccaggtgagtgagtggcaccaggtctccagcgctcggtatccctcttgggtggtgaggttctggctcccctccatggtaaatggagaccggtggtgatgtgggggcgggggggagcggggacaaggaggagaaactcaggtccctggaatctcctggtcccagagctccctgagcggtgggaacatgcttctgggctgaggtgatgaggtgagccagctaagtgacgggctgccttgcatccagggtgctctacaaaccaagatgggccggccgtgggggctcacacctgtaatcccagcactttgggaggacgaagcaggtggatcacctgaggtcaggagttcgagaccagcctggccaacatggtgaaaccccgtctctactaaaaatacagaaattagccaggcatggtggcggacgcctgtaatcccagttccttgggaggctgaggcagaagaatcgcttaaacccaggaggtggaggttgcagtgagctgagatcatgctactgcactccagcctgggcgacagagcaagactgtctcaaaaaaaaaaaaaaaagagattaggaaacagccacgtagggcagactaataaccgtgcccccccgcccccccaactccactccaacggacaagtgacaaaaaagtgacaaatcgcagtgctgttaagaccaagaaataggcagctcctctgcatctggtaggaatgctggagtggagggggtaaagggccgcaaaaacagccctgtagctgtatttattaataaagttttatcagcc[137 bp omitted]gcttggtgacgggcacctgtagtcccagctactcgggaggc[137 bp omitted]taaagttttattggcacacagccacgcccattcgtttctcagcttttccaacacaatggcagagttttgggttgttgctgcgacagagaccgtccagcctgtagagccaaaaatatttacttcctggtggtctggagaaaaagtgtgctgcttcctggcgtagacaatgtttctgtttgtttaaagaatacacatgtatttgcttacaaaggcccagatgggacatggggctcaggggtgggtggccgtggacagaggtgggcaggaggccaccatcttgggaggaaactgagccccaggcaagcagcaggagggcaggaggccaagatggggcaagggagaggtgggcaggatccagggaggggaagccagaatcaatccctgcctccccaggattacgagagagcggcagttccagctcgggggtcactgcttggatgggaaaagccccagtggaaagccctgagcactaacagcatcccaggcgcagcgcaggcaacggaacctgtgatctcctccaagccttttccatagagggggaaacggaggcacaggcagtcacacacttgtcccaggtcatacagccagcatgtagcaaggatttgaacccaggcctggctgagctcagaagaagctgagcaggaccggctgcaaaagccctccactcaaccaggtctgaacccatcggggccctgaagggggcatggctggatgccgtctgaggcagttcaggcctcttgtccatccttcctgggccagggacctggacgaccttgaaagtggctctgattggctactgatgacatcatcggagatgagggccaaaatgactgggcctcactcaattggtcttggtgcccacagctgggtctgtcggcatccccctgtgtgtctatgcatgctcgtgtgcctacgagggaaccctgtatttcattcatgcgtgggtacatgtgtgccgcatgtatgtgctcacgcttgcccgtgcccacgtgtccacacgtgagcaattcccgtgtgtatgtggccccgcaggggtccccataagcgtgtgtggacagcagccagccagggtgcagggggaggtctcggccgcctgacgctaccgagaacacctaattaaacaaaaacgtacatcgcgaaccacactctgcccagttcctcggagtttaattaaaacaacagtgcaggaggcgtgtgtggggtccacaatcagatggcagaggaggaggaaggcagggagtggccctggcagtccagatggtcccccaccaactgccagggactggccggaggtgcccggagctcagggctggtggcaaggtgggtgggatcgggtcagggtatccaaggccccgggccccagcaggaagaatgagctcccagcccaagcaggcccttccaggcagccggagaggagagagaaaaagggtgtgggctcggcacggtggctgacgcctataatcccagcactttgggaggctgaggaggtggatcacctgaggtcaggagttcaagaccagtctgaccaacatggcgaaacactgtgtctactaaaaatacaaaaattagctgggcgtgctagtgggcgcctatagtcccagctactcaggaggctgagccaggagaattgcctgaacccaggaggcggaggttgcagtgagccaagatcacgccattgcactccagcctgggtaacaagagcaaaactccatctcaaaaaaaaaaaaaaaaaaaaagagtgtggatgggcgcagggggcatttttttcccagactccgggggaccgggcagttgatggcttcacagcttgtccttttaataccctgagtgctcagagtgcaggctggcttggggcaagagaaggcaggttgttctgtcccagcctgggaaaggtcagggcaaaattatctgctaggaagagcagggcgggccacggtgggcctgactccgcccccgctccttcctccatcccccagcaggatgggatccaggacccacgcaaatgaaattgtggggtctcttgttagaaaagtattaagactttccagaccacaatagcgagcttttatcttttcttccccctcccccccaccccccttttagagacagggtcttgctctgtcacccagactggggtgcagtagcatgatcatagcccactgtagccttgaactccgaggctcaggcgatcctcctgcctcagcctcctaagtacttgggactataggcaggccccattacaccaggctaagttttacatttttctttttgtagagacttggacagtgaggcatggggtctctatgttgcccagactagtctcaaactcctgggctcaagtgatcctcttgacttggcctcccgaagtgttggcattacaggtgtgagccacggcatgtggccagcagcagagctttaaaaagcacggggcctttcttttttttcttttgagatggagtctccctgtgtcacccaggctggagtacagtggcgcaatctcagctcactgcagcctccgcctcccgggttcaagcaatcctcctacctcagcctcccaagaatccgggagctaggatgacaggtgcacaccaccatgcctggctaatttttgtatttttagtagatttggggtttcaccatgttggccaggctggtctcaaactcctgacctcaagttgtccacttgcctcggcctcccaaactgctgggattacaggccaaagcacagggcctgagggagggatcctggatgactgtacaggtcactcgcctgtgatgccagtcccagtttcatgggaccagagtctgaaatcgagtactactagggccgctgtgataacccctcccagggctccaagctggtcacagctgggctgccgtggaggacattggaatagcctcatcttgggaagccacatgcaggggtcacctcccagctaatggctggcagtggctcatatacatgactgggatgtctctgcaggtgacaggtggaacccactcacctgagggctgcagaaggattggtaacaagcatcttactaaaccagaatcctaacagtgatgaacacagtaacggggaagtagaattgaccaaatatggcattgtgctaatcttgctccctgtatcactcactcatctggttcacggaattaccccttgtggtgagaaccattattacccgattttttttttttttttttccctgagacggagtcttgccctggtcgcccagactggagtgcgatggcgtgatctcggctcactgcaacctccacctcccaggttcaaacgatcctctcctgcctcagcctcccgaatagctgggattacaggtgcccaccatcacgttcagctaatttttgtatttttagtacagacagggtttcaccatgttggccaggctggtctctaagtcctgacctcgcgatctgcccgccttggcctcccaaagtgctgggattaccggcgtgagctaccgcgcccagccatttcatttttattcattcattcattcattcattcatttattttgagacagagtttcgctcttgtcgcccaggctggagtgcaatggtgtgatctcagctcactgcaacctccgcctcttgggttcaagcaactctcctgcctcagcctcctgagcagctgggattacaggtgcacgtcacctcacccacctaatttttgtatttttagtagagacgggc[136 bp omitted]ctcagacaagttcattaacctgccctaggtcacacagcaaccaagtggcagccaggacttgagctccacaggctgggcccagtgctaagaccaaactgcagtggagaaggcagcacagagtggttgggcaagggtttgtaggcggctgtttgaaatgatgctgaacaaaaatttgttcacaaaattgcttcctcattataaaacagcatcactcagacagccccctataaaccccttgcgacttgttcaagaaatgcatttaggctgcatgcagtggcttatgcctgtaatcccagcactttgggaggctgaggcaggcggatcacttgaggtcaggagtttgagaccaccctggccaacatggtgaaaccctgtctctactaaaaatacaaaaattagctgggcgtggtggcatgtgcctgtaatcccagctacttgggaggctgaggcaggagaatcgcttgaacctgggaggtggaggttgc[132 bp omitted]tgcaggcccgtgtgaatgtctggggaagtggggcagcagtttctgcctacctagcatccgttcatcctttattttttgtagagatggggtctcgctatgttgcccagtctagtctcacgtgtgatcctcccacctcagcctcccaaagtgctgggattgcaggtgtgagccaccatgcccaaccctgtttatctttattcctttgggggaaccacactcactcttggctccaggtaggagtctagccaatcagagtgtttgttcctcctgagccacagtgattagttcagggaagggaatgggatccaagttcattggcagtgggggaagtctcactaaggatatcatcaatacagaaggaaacaaagccaagagacagagagtgagctctgagaaaattcaatgagcccctggatccagctgaacctgaagccagccactccatggaattttaattctgcacatcaattacctttctcgcttgaacccatctgagttggatcagccttttgtcatcagaagcacatgatgaagattataaattaggatgattctagtctctcaattcctttctttcttgcaaaggcacaataaatccccaccagtaggcgctgggccctgagactgttactggttggataagggagatcaaggtcctcccaaaaaacacaaagcaggagggtttggggtaactttcatgtattccttttgtgcttgtccccaaagcccagggcccagtttatcctccgcccgccctgaggagcccaatacctcggaggacagtaagcttggcatggactgtgatctccccaaccgagttctgggccacacactcgtacacgttttcatcccgcggtgtcctcagcggctggatcctcagcactgcccctgcactctcatcaaactcaatcgtctgccatgggcaggggaaaaaagaacagagtgaggctggggtcccaggaaggttcctgtctaggctgggctaggctgggctgtaggggaatggcagtcagccccatgatcctgggggtgactgggagaattgctgcaggctgaatgtgcacgtgtgtcggtgtccagtataaatgcgccgcagacagggaccagatttgggtacatataagaacagggtgttgtgtgcatgtgtgagggtgacaaatgtctgcaagcccatgtgacaggcatgcaaaggcatgtgaagacatgcggaatgtgtcaatgtgcacgtgtgatcatgggcgtgtattgagagttgtaaagttccttctgtgtgcagtggtgctgtgtacactgcactgtgaagaagactcagagagggcagggctttgcttgaggccacacagcatggagctggtagagcaagtaaggcgggcagggccctggctggaggctgcgcagccatgcttgcttggccacagatgatgctccacctggggaacgtgtccacgaagtccactgtggctgaggtgctgtggccctgccttgggggagcattgaccccaggctgcctccccctaccccaactcacctcaaagcgctgagagttgaccttcttgcccttcttgttccaggtcactcgtggcttggggtcacccgtggcctgacacacgaaagaggccacaccccccgacacgccgatctggtccttgggttctttgataaacctggggggctctggggatacagtggaaagaagggggggcgctgatgggtccaggcatctggctaggataccaaggagccacgaaaacctgcattccatgccctgcccacggaagtgccatgtggccaatgaagagaggaggaggaaagcaaggatgacaacaaacaccctcccacctcgccccccaccacggcacccatgggcacccaggtgcccacatatccccacttccacctgcaacagccacacctgctcacacacagtggatacaacctcacctgggcacacctgctcagacacagtggatacaacctcacctgggcacacctgctcagacacagtgccactgggaaagatggaaggggaaacctgtgagatgctggggtccctaaattcagcacctgaaccccccctccatggtgaccagccaaaccctggagggccctgaaagcacttgccagaataacttggtctaatttcctggtgagacatgtggggaaactgaggcacccagcatgggggcggggggtgaccatgggacatgaggtcagagccagtatttgaacccagagctccagcttcttgggaggcatccaggaggtggctggacacgaggggtcagtgcccaggagagtgctctgagctggaggcaggagctcagaaaggggaagtaatatttaatatttaacctctccaacagcatggagaggcagtgccatcctgatcgtcattttcttttcttttttttttttttccagacagtgtctcactctgtcgcccaagctggagtacagtggtgtgatctcggctcactgcaacttctgcctctcaggttcaagcgattctcctgcctcagcctcccgagtagctgggactacaggtgcccaccaccatgcccggctaactttttgtatttttagtagagatggggctttaccatgttaaccaggatggtctcggtctcctgacctcatgatctgcctgccttcgcctcccaaagtgctgggattacaggcatgagccgctgcacccagccttcttttctttttcttttctttttttttttcctgagagatagggattcactctgtcacccaggctggagtgcagtggcacggtcttggctcactgcagcctagacctcccaggctcaagcaatcctcccaccttggcctcccaagtagctgggactacaggtgaaggccatcacatctgtaaccccagcactttgggaggctgaggccggaggatcacctgaggtcagcagttcgagaccagcctgaccaacatggtgaaaccccgtctctactaaggaaacaaacattagccagacatagtggtgggcacctgtaatcccaactacttggcaggctgaggcagaagaattgcttgaacctgggagatggaggctgcagtgagccaagatcatggcaccacacttcaacctgggcgacagagtgagactccgtctcaaaaaacaaaaacaaaaacaaaaaccagcctggggtctcactatgttgcccaggctggtctggaactcctggcctcaagtgatcctcccaccttggcctcccaagtagctatgttgtccagcctggtctcaaactcctagcctcgagcaatcctcccacttcagcctcccaagctgctggatttataggcgtcaaccaccatacccagctctgccatccccattttacatgtgaggaaactgagacacaaaccaggcaagggacttgctttggctggacatgcacagccaggcggtggctgagctgaacgtgctcctttgaaccagcctggctttcacatccacattcttcaccctccatgacgatctgatgtattcattcagtctctgcaataaagcctggagtaggagtgtttttgtttttgtttttgttttttgagatgaagtgttgctctgtcaccaggccagagtgcagtggtgccatctcggctcaatgcaacctccgcctcccaggttcaagtgattctcctacctctaactcctaagtagctgggattacaggcacgcaccaccacgcctggctaatttttgtatttttagtagagatggggtttcaccatgttggccagggtggtcttgaactcctgacctcaagtgatccacctaccttggcctcccaaagtgctgggattacaggtgtgagccactgcgcctggcctggagtacgtgttttttttttgtttttgttttttttgagacagaatctcactctgttgcccaggctggagtgcagtggtgcgatctcggctcacttcaagctccgcctcccaggttcacaccattctccttcctcagcctcccaaggagctgggactacagatgcccgccacca[185 bp omitted]gcacctgggacaggctacagtatctgtggagaattcattaacattgtttcctttttatcgactatttttacagtaacctttgcatctcccagagggacactagatttccggtcacagtacacagtaatgttacaatgtatcccctaagatga[144 bp omitted]gcctcccaagtagctgggactacaggtacccacagccacgcctggctaatttttttattttttttccccgagggctgcaacatacttacaagagcccttaggaagcagcctatatatccaataaaaaggaactgatcaagtgaatgccaggctatctatgcagcagaatactacataagtataaaaagggggaaaaagc[142 bp omitted]ggtggcaggcacctgtagtcccagctactcgggaggctgaggcaggagaatggagtgaacccaggaggcgaagcttgcagtgagccgagatcgcgccaccgcactccagcctgggcgacagagtgagactccatctcaaaaaaaaaaaaaaggaggaaaagcctcccttcctcggcgctgcctaaggaggtggcagccgtctcctcctcagcatcatggccgccctcagactcctcatgaagcccaagatcgtcaaaaagaggatcaaggcgttcatccggcaccagtcagaccaatatgtcaaaattaagcgttaactgggggaaacccagaggtattgacaacagggttcgcagaacgttcaagggccagatcttgatgcccaacagtggttacgggagcaacaaaaaacaaagcacatgctgcccagtggcttccggaagttcctggtccccagcgtcaaggagctggaagtgctgatgtgcaacaaatctccctgtgctgagatcgctcacagtgtttcctccaagaaacgcaaaaccaacgtggaaagggccgcccagctgccgtcagagtcaccaaccccaatgccaggctgcgcagtgaagaaaatgagtagacggctcgtgtgcatgttttgtgtttaaataaatgtagaaactgccaaaaaaaaaaaaaaaagggagtggggggtgggggaaaggatgcttttttgtttcagacagggactcgctcttctgcccaggctggagtgcaatggcacgaacatacctcactgcagcctcaatctcccaggctcaagcgatcctcccaactcagcctcctgagtaactgggactacagtcacatgccatcacgcccagctaatttttgtactgagttttgccatgttgcccaggctggtctcaaactcctgtcctcaagcgatcctctcacctcgagatgctttttgattacttatttatttatttatttctgcggcagggtctcactccgtcacccaggctcaagtgcagggcgcgatcttggctcactgcaacctccgcctcctgggttcaagtggactcttctgcctcagccgcccaagtagctgggattacaggcacacatcacgcccggctaatttttgtatttttagtagagacagggtttccccatg[137 bp omitted]agatatattattaaatggaggaggtgtgtataagcaagaggtaataaagtgtcgcaaatggtaccgttgtacgattttttaaaatgaaaaaaggggttgggcatggtggctcatacctgtaatcccagcactttgagaggctggggcaggctcactagatcaggagtttgaggcccgcctgaccaacatggtgaaaccccgtctcttctaaaaatacaaaaatcagccaggcgtggtggtgcatgcctgtaatccccgctactcaggaggctgaggcaggagaatcgcttgaacccgggaggtggaggctgcagtgagctcagaccgcaccactgcactccagccggggcaacagaccaaaactctgtctcaaaaaaaaaagaaaaaaggaaaaagggaaagattgtatgtatgtgtagaaacagtgctgcctccagggagctaagtggctggacacagggacagagatttccactttggtacctttttacatgtagaactaaagacaaattgaagaagttatttttatttttatttttattttattttttcttcttcttcttatttttttttacagagacagggtctcactctcacccaaggctggagtgcggtggtgcaatcatagctcactgcagcctcaaactcctgggctccagggatcctctggcctcagtctcctgagtaattggaaccacaggcgcttgctaccacatgcggctaatttttaatcttttgcagagacagggtctcgctatgtttcccaggctggtctggaactcctgggctcaagtgaacctcccatctcggtctcccaaagctctgggattagcagtgtgagccaccgtgcccagctgaagttatctatttttatttttatttttttgagacagagtctcactgtgtcacccaggcgggagtgctgtggcgtgatctcggctcactgcaagcttcacctcccggattcacgccattctcctgcctcagcctcccgagtagctgggactataggcgcccgccacc[185 bp omitted]tgagctgattaaagaaaaaatggagcaaaactttgttttaagtaaaagtttggggtctgaggagaggctgaggtctaacaactcaaacttgagcaacgctaggactttgagcctctacgaccagctagaaaagggtagagtgagtccaggggccacacaggttgaccagaaaagttctggaaagttccagctattcagaagcccagagaggccttaagaaggcccgaggttccaagggtaggtccctgtgggccccaacgcctacccatccatggctcaggctgggctttaaacaaaacagagttcctgccccagtggcctgaccagcctaacctccctcactcaaggctctgctcctgttgatatgaccgtatgtgtgtgctttgagcatctgtcccaaaagtcactagacctggccgggcgtggtggctcatgcctgtaatcccagcactttgggaggctgaggcggatggattacctgaggtcaggagttcaggaccagcctggccaacatgatgaaaccccgtctctactaaaaaaatacaaaaatcagccaggcgtggtggcgggtgcctgtaatcccagctacttgggaggctgaggcaggagaatcgtttgaacccaggaggcagagggtgcagtgggctgacatcctgccattgcattccagcctgggtgacaaaagcaaaactctgtctccaaaacaaaacaaaacaaaaaaatcactagacccaccatgtacaggaatgcacagcctcccttaactttttttttttgtttgttttttgagatggagtctcgctctgttgcccaggctggaatgcagtggcgtaatcttggctcattgcaacctccgcctcccaggttcaagtggttctcctaactcagcctcccaagtagctgggattacaggaacccaccacaacacccagctgattttagtatttttagtagagagggggtttcagcatgttggccaggctggtcgcgaactcctgacctcaaatgatccacccacctcagcctcccaaagtgctgggattacaggtatgaggcgccgcgcctggcccctcaactcttatttatccctctgttgcagcaacagccaatcccactgtac[134 bp omitted]atggtgaaaccccatctctactaaaaatacaaaaattagcccggcatggtggcgcatgcctgtaatcccagctactcgggaggctgaggcaggagaattgcttgaatccaggaggcagaggttgcagtgagctgagatcacgccattgcactccagcctgggggacagggcaagactctgtctcaaaaaacaaaccaccacaaaaaagatcacagagttcagaaataacagcactggaatttgaacccgggtttctgcctccaaagccgacatcttactgtcccttccacatccagaacttgagcctgattagggcagatgttttgctccacattgaggctggggctgccccctccttctggcctcaggaatggtgacccggggccatgcgtcctcagccaaggacatgaggaaaagtcactgtggccgggtcaagaatgttacttctggtaaaaatccctccctctggagctgctggaaggaagggcagaagctggctgagggtagagacgcatccagctgcctgtctgacctagagccagaacacaccccttgccccctccaatccagcaagcaagaccgggcgggtgggtgctacaatcagccactgtctgtgctgttccttcctcccagggtcccgtcctcctcctctcatctggcagcttcaacctcagctcggccagcacctcccctggggagccttcttggattactgcaggcccggtcaggagtcccttatgcccccaccgcagcctgggcgtccccagaacactgggctgagatacctgcttatgtggctctcagcacagaggtcaagggacagccttggttccctgggacctcagacttcttctcggtgtgtggtgacccttgagaaaacggagctcccaacatcactgcctgctctcggatttggaggggttctacctctcggaagcacccccatcactgcagagcagataccctctcggtcttctccaggcagctttgggatctgagccagcctggaagagctgtccctgcccactgagtcccccgttagaaaatgtcttgcaaatgcttgcaatctctcctttggacgaagcttccccacctttttctcagcaaaggggcagagacacaggaaggacacctctggggcttgagggcgccgcgcctgcagctcgagaggcacaaagacacgccatgtgctaagctttatgcctgtggccaggaggagcaaaacaggctcagaaaggtgaagaggcctggcgcagaggctcacacctataatcccagcactttgggaagctgaggcaggcagatcacctgaggtcaagagttcaagaccagcctggccaacatggcaaaaccccatctctaccaaaaatacaaaaattagccaggcctggtggtacacgcctgtaatcccagctacttggaggctgaggcaggagaactgcttgaacctgggaggcagaggctgcagtgggagccgagatcgagcctgggcaacaggacaacagaacaagacttcatctcaaaaaaaaaaaaaaaagaagggacctgcctttggtcacacggcgtgtgatgggcagagacaggattccaacccaggcctacctggctccagtgccttgaaaatcacgcaggctggataaatggggttgggggtctttattgaccacaagtaccgtggatgtccctgtctcttagatgaagagacagaagttcatgtggtattgccaatatcaaaaaagctggaaagggaacccagccctctctggaggcaacgcgcctgagcctcccgctccgtggcctggcttggccccatctctgtttttccatttcagattctgcagacaagaatccagtgccagagctggtgacccacccaccctgtcccctccaaccctgcccggggccagccccacggcatcctgggaaggccccactggacctgaagtggtttctagagcagaaattgttcccctatgcctgtaaccccagcactttctcctgtcaccccagcactttcgcctgtcacaccagcactttcgcctgtaatcccagcactctgggagaccgaggtgggcagaccacctgaggtcaggagttcgagaccagcctggccaatgtggtgaaaccccatctctactaaaaatacaaaaattagcagggcatggtggcgggtgccagtaatcccagctactcgggaggctgaggcacgagaatcacttggacctgggaggtggaggttgcagtgagccgagatcgcaccactgtactccagcccaggagacagaaggagactccgtctcaaaaaaaaaacaaaagaaaagaagaactgaaaggggtcagtactgaaggccagacatccccaatgcaggtgagacaggccaggaagactcaggccctggaggcagccagacagatcacagtgcagctatacctggcttctggtccctgagggagtgtggtcattgggaacttggcctgtgggaccaggcagctcaggttcaaatggccacttctggttgggcacagtggctcactcttgtaatcccagcactttgggaggctgagttgggaggatcgcttaaatctaggagtttgagaccagcctgggcaacatagtaaaaactccatctctgtaagaaatttaaaaacttagccaggccaggcactgggactcacgcctgtaatcccagtactttgggaggctgaggtgggaggattgcttaagctcacgagtttgagaccagtccgggcaacacagtaagaactccatct[212 bp omitted]gaggcaggaggatcgcttgaatctgggaggcggaggttgcagtgagccgagactgcgccaccgcactccagcctgggcgacagagtgagactctgtcacaaaaaattaattaattaaaataaataaataaataaataaataaataaataaataaataaaaattagccaggtcaggcacagtggctcatgcctgcaatcccagcactttgggaggccaaggcgcttcagcccatctttcttttttttctgagacaaggtctggctctgttgcccaggctgagtgcagcggtgcaatcagtttccatagttgtacgacggggatgctgataatcgcattcacctcatcagggtgcggtggctgatctgaatgtataggggcatttactaaaaaacagcatgaggctggatgccgtggctggctcacacctgtaattctagcactttgggaggcagaggcaggtggattgcttgagctcaggagttcgagaccagcctgggcaacacagtgaaaccccatctctacaaaaaattaaaaaaattagccaggcatggtggcccacgcctgtagtcccagctacctgggaggctgaggtgggaggattgcttgagcctgagaagtagaggttgcagtgagctgagatgctgccactgcactccagcctgggtgacagagtgagaccccatctcaaaaggaaaaaacgacaataaaaaaagcagcatgaaaataagaaaaagcgcaaatgaatgaggcaggggtgtatgtctccagtttgttaaccagcagtaatacctacgtttgtggtaacacaggattgccggcctgctatgtccctagcagcaggcaggggcttatgaaatgtccacatcacaagaatgctggatgtggataatgatatgagctctgtgacagtgggtaagggaggctgagccactagcccggggttgtgcagcaggttggcagcagagccaggattcaaacccagcctgactgcagaacccagtctcttgccctactgccctcatcccctatgtcctcatgggcctgagtgatgccttctccaggtccttcatggtggggtgagtcttggcattgggccccagatggaccctcatcctcttcacattacagccagaaatgcttccttgcccatctctaaactataccaacctctttcatctgcaggccttcccgggtgctgtcatcctgacgaggaatggcttttctatcggcgaactcctatacacccacaaaaccccagtcccaatgccctttttcccaagaagcctcccctggctccacctgagacagtttgtctgcctgtgtgtctgccaccaggtgtaggtactgcccacagcaagggaaggtgaactctgtggctcactaagcagtgatctcaaataagtccttgcctcgttttccctcattgggaaacgtggaaggtaacagaactggcacactgggttttgtcaggctcaagggagaggaagcaggtaaaattagtgcttagcatggagcctggggctgagttgatgctggggaaacagacgccgtcatcatcattacggttattactttatgaataccagcattattatttatctctgaatctcttagggctcagcacacagtcctcagcattcagcctcatttgtggagcataaaagttccatttggcaaaatggagggccccagggaggaggtggggagtgtgcccacacacacacagccataaatgcacacaggtaaacaaacacgcagacccctgcacatcccgtgccggcttcttaccttctgctgcacagcctccaacgagcaggaccacaaggaggcccatgggaccaaccacagacaccatgccagggccccaggtgggcgccatgcttggcagcgacctccgatctccgccctggagggggatggccccccggtccctcacagagaggcctcgagccgagcgtcagatggggcaacgtctgcagagacaatggagggctgtgagaggcgagtggggaaatccaggagaccttcatggaggaggcagagggagggtcacatggagcaggggagggtcctgcgggggctggtcatgggacaatggggaaggatcatggggtgatgggatggaatgaaagtgctgggcccttgctatagaattaaggtgtctcccccacaaaaaatcatatgttgaaacctagtccccactatgatggtaacaggagatggagtgtttgggaagtgactaggtcatgagagcagagacctcatgaacgggattagtgtcataaaggatctcccagaaagctcccttgccctttctgccacgtgaggacacagggagaagatgccttccacgaaccagaagatagccctcaccagacaccaaatctgtgttgccttgatcttggacttcccagcctctagaactgtgaggtaccaatttctgtcatttataagccacttggtctgtggtatttggctacagcagcccaaatggactaagacagcctccaaccaccagctaaaccccaaccccagcatgagtccccaacccaggctgggcccctgactcagaccaagccccacaccaggactgaggacctgagcccctgactcagaccaagccccacaccaggactgaggggtgctgagccccagttttctccaactcacaggctgcttctcaggaaggaggggactccagactatgctgctgtctggctctaaaacctgatcccccaggttataagacaaatctcttccacacacctgcctgtccctgccctgctctaagacctcccatggctcccagagcccccaggggaagccactcttgctgacttcactgtttcctctcgcttggaggtacagccaggccagccaagctcagtcccacctccaagcctttgcttctgctgtgccctctgcctggaatgctgtccccaccacatgacaggtctcagcttagctgtcacttcctcaggaaacccttctctgcccctcaaaggtcaattccccctacattctacatcccggagcatcagatatgactaaggttatcctccgtggtattcaccctggttcccaaactaaatgaaaagatgttaatcattcagcacgtttctcccacaagaacctcaactcctccagggcagaagggtccctcgtcacataccttgaaccctggaatggccccctccccatctccccaatctccactctgtccagagccaggtcagagggccagggaggggaagggagaggcccaaggataagatctttgttgcctagtcaggctggcacccatgccagcccatgccctgggcgggtccaggccgtgaccacaggaactggtggcgcataataacggggcagcccctgtgattctgactcccaaaatacccagctgcggtcacctcgcccagccctggggcggtcccaggggaaggatgggcgggtagtggccgggtcacagcctagggtgacgaacgggattcggggggcctcagtgtacatagttaggccacaggcatacagtcagaccagccacagagaacgatgcctgctaaatcacgccacagacatacacagatgcacacagtcaaaccaccgatacacaccgacacacagtcagactgcaagcggttgcatatctgcaagagacacagaaacaaatgcattcacacagtcaggcagcagagacgggcacacacacacacacacacacacacacacacacacacacacacacaatcaggcaaataaaacttgcacatagtcagaccacaaacacagacaggcccaaaatcagaccacagacatacaccaagccagaaaagatacacataaggggtcatggtggggcaggcagtacacatacacagttgggttacagggaactgcaaacatgcaattagatcagagatacctacaggtgcacaagccggtcaaagtcacacgcagacacaggtgccggcacactgtcagactatagataggccagtcagtcagcagaccacaggtgcatgtgccagccagccaaatagagatatgcaaagtcagattcccttcctacacacatatgtgcacacaggcaggctacacagacatgcacacacacagtcagactctaggtacaccttgcacacaaccagttggggactgggaagatgaaggaaataaagcctagagcacagtcccttactctgagtccctgccctagccctttaagagcaaaagttgccaacgaggaaggcggtggccccagatggagaaaacagcctgtggccagctggggctagggtgaccacagcggctggccctgcccagaaatgcacatctgcttggccacactgagggggcgaggtcagtcccagaccactttgagcagctgggcaggcctgcagagagcctctggggaaactgaggcagcatagcaaacctgaagctcagagggcatgggtaggagtcacttgcacagagagcccaggtggggcacatatatggagggccccagccacagctggctctcccacatcccacgaggacctcagggcagcatcagccaccttctaaaccaggcagccctaattacaccctggctcccacggcagaagccatgttgggcccacacctccctgatgtctgcgcaggatggggctgagtcaggcacagacaggcagggcctggccatggactccccccagatccgccactccagcctgtcaggggcagggacgaggggctacagtaacaggagcatttggggcattggatgatgtatcaggaatagggtggtgggaggggcccagggagtggggttcagacactaccaaagacaaaacatcccggggtcccttaggtgccaatcctccctaggagaacctcccatgatggggataggaccctgcacacccacaatcctcccaccgactcctgcttccacgaaaaccccaggcgtgaggtcctctgcgaggatttgggagagaagatccctaggtcccatcagctctgccttcagaatctgtccccaacctgcccacttcttactcattcttctgcctccacttcttccagccccattgtcaccgacctggacagatgtcgtcacctccatcgtggtctcccagctcccgcccttgtcccttgatctgttccactcacagaaaccagaaagcatctgcaagcacccgagtcagggctcgtccttcctctgcccacagccctccatggctcccacctgcctcggggtcaaagcccaagtccttcctgaggcccaccaggtcctgcacgacctgccctgtcccctccgtgccctcccctcctccctttctccccctcctccctctgctccagccgcatgggcctccttgctatttctccaacaccccaagtgcagtccagtcctgcccccgggcctttgcgtgggccattcctggatttaatattggctgaggaccaaaaggtgaatgggaattgggggcaagggtgtctctgcactacaaacagcatgaggaagagcaagggggcagcactgagaggtcctaggagggagagggggagagatgaggacagagaggtgcacatagactagacccacagagcagccaggagccctacgtggccctgggcagggagggaaatggccaggttggtgccaggccaaccctccaccatgtcctcttgcaaaaggcagcctgggccaccagccttgccactgccaagaaagggaaattaagtcaggtgcagtaatctgcaagctcccagtaaatgacacggctgttaggaaaagcatggcagcccatggtggccagcgaggctgagccagggctagggagaaggagagggagtgaccgctggacgctgaacccatgtggggctcagggagggtctctgcccgccccacctggctctcaggggctgcactgcccaccactagctcacggcagctggtcagaggcaggcgcttgacttttacagatgaggaaactgaggctcacagaaaaacagggactcagccaaggcccccagctggggtgggacttgggtctagagcccacgtttaatcttgtgactgtgtctttctctggccactgcgagatctctggacaactctctctgggactggtagagcccgctggccgcctctgggggctcccccgcggtgctaatggggggcgagtgggcactcattccaaccaggcgccggggcatgggtcacgcgatctgggagccggctttgtgtgcccacgcggtccaggaagcataaaggggtgattatgacccaggccgggcagcaaacaggctgtgtcacccgcacgaggcgggggctcctcgggccagaggaggctcccggtgcctctcccagcccaggctccagctgtagagtccatgctgccctgtcctggggcgggagtctgggggcctagtcctaaccctcaggggccatcccatggccccagggcaggagaagctgaggctgattatgccagcagtgggactcaggggaaagacccctgaccctgcacaatctctccaccttcacatccaccccccacccacagctctcccgtgccaccgcctggaacgtcatttccaggactggaccctggcctccagcctccctggacacctgggtcactcccacatccactcaagcagggacaggcagcgagggcccccctgggcagcaagcacaggctctgtggccactggtgggctcaagtcagctctggccaagccactgtccctcccagggcgccattatctccctatcaggaaatgggctcagggaggggctgggtggggctggcccttcccggaactgaagtccggggacctggctttaattgactattgatttgtattgggacgacgtgaaggctcagggcactgtccccaggggtcctggtggccaggagtggatgggtggggcagacagggaaccaggcccagccctggagagggaaatcattaaagtccactgggtgcctctggggtgctgagccccattaaatgttctctgtgttttctgctgtttaacggattaggaaaccgaggctcaccaagggtcctgcatggaggagggggctgggctgggttaggatttgaggccagagcccggctctcagtcgagcccagagtccacatcctctgggcgcccaggctgccaaaattgcccgtcagtgtgtcccccatgctggcttcatggaacaacttgagacgccaagatctgggggtacccctgcttctgctcacacacccacgggggctcccagctcctgtgctcgctgctctgggcccttcttgatgtgactgcatccatcgtcttccctaccccctcttcccgaaaggtcctgcagttctcagaatacactgcctcaggtctctgagcctcttcgcatgcaggtcccccacctggcacacccttccccagctggcccatggtcagttcatcctgtaagctgcagccacgagatgcctccactccaagctgagccccgttcctcctctgctctaaaaccctccatggctcccatcaacacgtattaaaactcagactgctacctcagcctccagagctgccagcccggcctctgctgacctcatcacgccacaaccccccatgccaggcttcccttgacaccttgatcccccccacttgtggcccctggctcccacaggggtatttacacacactgttccttccacccagcataccctttcacatcctcatcaaatctcagccctcatacttgtcctcagggctcagctgagctgtcacctcttccaagaagccctcctggatgccccagggtggatcaagacccattctgagctaccccatcacagctgtgctcccactgtgggtctgtcaaccccctggatggaagcccttttcccaccccaggaacgtggcaaagcccctgcatgcactggatgcctgctgcataaccagctccacctggcactttatccacagcatccctggcgtcacctgggtttcagaggtagaaactgagaccatagacagagaccaccccaggcaatggagaccgagacggggacagcctcgcatccaccctagggggtctggcagagacttaaagggtgggggtgaggctctggaaggaacagacagctgaggccagcctgggttctgcaggaagccccttggggagggtcaccaaactctgtcagctcagtacttgggtcctggaacggcttagagcccagggacgggaatgggtaaaagaaaggtacgagctgccctgaccgtctcagaagacaacaccacaggcccctccctgaggccaagccccccagtttcttaaagccccccaacaaagcacagaggcaacgtggggtccacaggcccgagaggagcggaaacaaatggatggaggtaaacttcctgcgattttcgggggtggctaagagcagggattcctgccatgcaccccccaccgctacctgccccctctgcggtcctgttgcctcctccgccttctgcgaagtccccagtcacagctcccccgggctggcagcgaaggctgccccgcgcctggctccgcccccgggaggtgggggaggagagggggtggggggaggaggtcgggctgggggccaggcgggggaggggaccctgcggagcataacggtctggagttttccaaagtgcaagcgacgggcctgaatgggggggcgccaggcagcagcaggcccaagctggccctggagggcggccggcacggtcaggcccgcgctgggctgtggggacccccgtggtccccagcctcggagcctggagggggcgcgacaagagagacaaagcccggggcggcccgggcctcggggtggaagggggtcccgggcgcactcaccccgcggctcggagatcgggcccaggccccgcgaggcctccacagggcccgccgcagccgctccccgcgtccctcggtccgcccggagcgcggcgcgcagcgaagactcgggagaggcctcggcctggggagctcggcctgggggcggggcaaggggcggggctgtagggggcggggttgcagtgggcggggctgcaggggacgggccccgaggagggggattggggggcagggcggggccccggccggaagtggggcggggggaccagaggggagccccatctggaggcgcggagagcctccgcaggagtccatgaaacactgagcgaaggggcgccccagggagggcacgacccaagacccctccctcccgaagacgtctcacggggagcctctacactgctcctcgcttccccagctctgatcgtagccatggcaacgcatgaggaggctggatgccggacagggcggcggagggctccccaaacacacccaactacaggaggtcggagaaggggcagagttcccctcccagtctgggtgggaccggaggcacggtgatgggggcggggggcgtcccctcttccccctcttagaccagagggtaggggagaggtgcgggcgcagaggcttccctcccgctgggggtccaggggaatgaatggggggacaccgtggcagaggcccccaccctcgccacaagcctgaggagggggcggagagcacagggccagattggaaacagatggggccgccgtgccaggcccgcgacaccggagcagagggagaggaggagggagagggaggggcagacctgtccgggcggccaatccgagccagcgttgcgcccggggtgcgggtttgaaaactccaccggaggggcccggaatgtagaagcccagcgggacctgggggtctggggacgggacaggggcagaggccgggatggagacccaagggctcccgcgtctgctcccatccctggaaaaaacgcctctcttcccagcattcgcgctgaggacgaagcccgaacgccaacgccaacgggatgtcctgggcgctcagctgccatcagctgtgcttcctcaggccaccggccacggctctaggaggcagaccccaccatcacccccattctgcaaagaacggagccgagaaagagagagaaacggctgcccacggccgggaagagcaggaattggaaccagggtttgggtccagaggaggagctctcaccacagcgctgctggaggcctggggcccccggaactgaggatatatcatgaataatttcaagccccttgggtttatctaggtacagggccatcctgaagacagacgccccactctctagaagccattactcagtggggcaaaggacgtgggctttgatgggagacacacaggcggctgtgagagcccagcagaaacaattccgctcccacggctcccgtccatgccctcccactgctacctcagtggctggctcccatctccttcaaacatcgaataaatgcctccctcactgggggataccacactgcccccttcccttaccatgcctcagtttccctcctctgcaaaatggagcatggaatcgccccgccccatctccaacaataggtggcctagtccacaaagcaccatgcacagtaggtggtctgtgagtgtctgcacacaggctccctgcctgcccctttgacacagagcacacaggaggtgctaaacacaggatgccgtgacgtcccccgtcccacgcagccccatcctcgacgaggtacacagtaggtgcttcatggaggaggctgcctggtgccccagcatcaccaaaggcacacaggaggttccctgtgtcaatgtaggcgtaggagcaaccagcgtgacctccccaacttggctgggcacacagtgggccctcaggagcagagtaggcaccttgcttgtatctgtggcaaggcacggggctcatacagactcgagtttgaatccagggatgccccgtgtgtcaagaaagcacccgtacctctcgggccgacagtttccccatctgccacataagccaagcactgaacaggtgctcaatgaatccacactgtcaggaggcttggggctgcatgacctgcagcatacaggcctggctctgggctgcccaggactcgggacggcagacaagggcttgccagccgcttcccagccagtcctgccctctctgggcctcttgtccatgtctctgtggaggcagactcttgcccctattccacagtggtgactgcagttggcaggggacacagccacccccgaggggctgggggaggtgggccaggtgccctcccccttggctgggtggccccatcagcacagagccctacatgcgcctagtccccgggtctgcctctcccaccagactgtgacctcaggaggcagagcaggatttgtctcggtcacccagtgtccccagcacctagcacaggtccacagtacaaaggaggttctcagcaaacatttgcacaatcaggcccagcctcacccaggagagcccctccgaccttattctcctccaaaggccacactgtgtgtgcccttgtcataaagcaggcatcttcacctacccttttttcaagacagggtctcgctctgttgctcaggctggagtgcagtggcaccatcatggctcactctagcctcaacctcctgggctcaacctcctgggctcaagtgatcctcccacctcagcctcctgagtagcttggactacaggcacatgccaccacgtctggctaatttttggatttttttgtagacatgggatctccccatgttgccccgactggtctcgaactcctagactcaagtgaacctcctgcctcagcctcccaaagtgctgggatcacagacatgagcccgtaataaggttaagcccagcctacccttttctaaacaaacatttccaagccccgatgccaggcacaatcctagacacacagtgaccaagactgacaaagatccctgccctcagggtgtggatgctctaaagagggtgacacatgagaaacaaaagaaatcaaatccactgtgggtcagatggtggtaagggccctgaggatgattgggttcagggttgtaggatgaggagggaggatcgcctgaggccaggagtttgagaccagcctgggcaatatagcccatcatctctacaaaaacttttaaaaattagctgggcctggtggcgcatgactgtggttccagctacttgggaggctgagggcggaagcatcgcttgaggccaggaagttgaggctgcagtgagctaggatggtgccactgcagtccagcctgggcgacagagcgagactctatctctaaaaaaatgtaaaataaaataaacacaggataggagagaggggaggtgacatgcgaacaaagaccaggagaaggtgagagaaagtgaaagaggattccaggcagagagctcagtccatgcaaaggccccggggcagcactgcacctggcgtgttggaggaatggcgaggaggccagtgttgctggagcagagtgaggaaggggagacaaagaggaggggaggggagggaggggagggaaggaatggggacaagatgcgcacggcctcagaggcctccaggaggaattgggctttgaccctgaggaaggtgggagccatggagggctgtgggtagaggaaggccctgactcaggtactcacagacatgctcagctgctgtggggagggcagactgtgggggatgactaggctggggctggactgggtagaggatgagggagaaaggcacattctaggcagacccaatagaattttctaaacggctcatttggggatgtacagaaaagaggggactcaaggatgacttctgggtttttggcctgagcaccctaaaggttaagggtggccacctccaggaagccctccctgattgccccgcctactccgtgcccttgggggctgacccctggacccctccaaaaacgttccattgatatgtcctctgtatacacccaggaggcggctgcccttggggaggaacacggggctggatcacgtcagctcccacagctgggacgttggggggtaatttttttcaaaataacttttcttctaattataaaataggcgcgtgcagcagaaaattaggtaaaatcagcataaagaagaaaataaaagttacccacaatccatccctcgcctagagagaaactgtttcatgcggccgttctcattcattctttccctgtacatgtgctgagcacctactgtgtgctgtgctgaggacacagtggtaagcatgatggaaccagcactcctgcccctgttggggggcacagactagttgcaggggggatggacacccacagaaaaacaaacactgtcaataacataaggccgggcagtgctaagagatgccaaaaataattaaataaaccacactgcaaggctgcaaaaactggggggtccctgggggagcctcttagaagtggtgataattgcatttacacctggaggaagagagcaaatcagacatacaaacacctatgacaacagagttgcaggcaggaggaacagcaaa[133 bp omitted]ctctgcctcccgggttcacacaattctcctgcctcagcctcctgagtagctgggattacaggcgcacaccaccacgcccggctaattttttgggtatttttagtagagacagggtttcactatgttggccagactggtctcaaactcctgacctcatgatccgcccgcctcggcctcccaaagtgttgggattacaggcgtgagccacagcgcccggcctccttccagtctttcttctatgcatacgaatgggtgcttttctttcgttcgatggggatcaccattagcagaccatgttccagtgtccgggtcacagaatttaatcaattcccacttgtttatcccattatgtcccttataaacaacactgtgagggacattcttagacacagctgtgtcccttcgtctcctgaagaaacttccaaagcaggggtgactgcattgggatgttctcaagcctttaaaccttccctgatggggaaccctcagataaaaccatacccttgaccggggcaggaccccctcccccagcctgtctgtcccacctccttcatatttggcaccaaaacccccagacatttcatttaggtacaaactctgtactcttggctgtgagagccagagagaaactggttgggcagcttcctctcagcttccctgccctggtcttgcccatgcccaaggctcccgcctcctacctagcacagcattcatgacccggggcatgggcgggtgccaaccagccaggagcccgcctcacccatgttcacatcacagccctggcgccgggtctacccgccagccgcaccgcagcgggcatgatgcccaccacaggcacgccccagctccatgtctgcctttttcacctgtccgcccccgcaggccaggctaccttccccttcctggaaaatgtgtgacaccttcaggcatggctggatccagcaaagccattcctcccatgtcttccccaactctgctgatagcagctctgtccttccaggggctcaggctagaacctggaagctggccctcactgcttttcctccctcaccccatatggtgttggtctggaaatactctcacgtttgtctcctaaatttctactcactttgtccatctttctccatattcccttcccaacccatccagcctgatcattgcctgctcggaccagcacagtcacctctgccctggtccccagcctcccaccctcgccctccagtctgtcctccccacagcacccactacatggtgccggtgtgcacctgagtcaggtcccgtccctcctctgcccacagccctccatggctcccacctccctcagggtcaaagcccaagtcctcctggtggcccacaaggccctgcatgacctgctccatctcctccctgccctccattcctccctctctccccctcactctgctccagctacatgggcctcctcgctgttcctccagcaccccaagtgcagtcctgcctcagggcctttgcacaggctatgcctctgcctggaacactgttcctctacattttcttgtcacttttcttctcacccttccattctccctcaaggatcacctcctcagaaatgccctggctgaccacctggctcaagcagcacccatcacccattacccattattttactgtcacctgaaattctctgtctttactcactgtctgggtctgagttatcaaatacaagaaccactagtggctgggtgtggtggctcacgcctgtaatcctagcactttgggaggccaagatgggtggatcttctgaggtcaggagtttgagaccaacctggccaacacggtgaaaccccatctctactaaaaatacaaaaattagccgggcatggtggtgcgcacctgtaatcccagctactcggggctgaggcaggagaatcgcttgaacctgggaggcggaggttgcagtgagctgagatcgcgccattgcactccagcctgggcaacaagagtgaaactctgcttcgaaataaaataaaataaaggaaaagaaaaagaaaaaggaccactagccacatgtgactcattaaacttaaatgaagaaaaattaaataggccgggtgccatggctcccacctgtaatcccagcattttgggaggccaaagtgggtggattgcttgatgccaggagtttgagaccagcctggacaacatggcaaaaccccatctctactaaaaacacaaaaattagctgagtgtggtggtgcacacctgtagccttagctacatgggaggctgaggcatgagaattgctagaacccaggaggtggacactgcagtgacgtgagatcatgccacagcactacagcctgggcaacggggcgagactccatctcaaaaaaaaaaaaaagaaaagaaaaagaaaaattaaataaaatttaaaattctgctcctcaagtcacaccggccacatttccagtgtggctcatggtcagagtactgaaacccacatagcacacttccatcactgcagaaagttctgtggccagctctcccagcaacaaaggggccaggtcagtcttggtcactgccagggtcgagtacacagtatatgctcaataaatgctttctaaatgaagaagtggggcgggtgtggtggcttacacctgtaatcccaacactttgggaggccgaggtggacagatgacttgagcctgggtttttgagaccagcctgggcaatatagtgagaccccatctcaccaaaaaataccaaaattagccgggcatggtggtgcatgcctgtaatcccagctacttgggaggctgaggcaggattgcttgagcccaagaggcagaggttgcagtaagctgaaattgtgccactgcactccagcctgggtgatagaacaagactccgtctcaaaaaaaaaaaaaaaaaagaaaagaaaagaaagaaaaagcggtaaaatatatataacaaaaaaatttccataaaaaatatagacatgaaagagtgaagacatcaatggctcagaggccttgcagagactagaggtgctggccaatagcacagaggtcagcaggtgccatctgcagccacagtaccctggccactctcactccctgggcagccacgttagggtatccaaactctacatttccaacatagtgacatggaaagccagaaagcaaaagccacattgctgggctttgaacctggatctccctggctggccagcaaagcatcctctgggagctcttgctccagccccaagggcagaaacttggaaaaggcttccaggccacagccggagtcagctctgcagcgccaacatgctgactcagccaaaagtggaggacgggggagggacagaatggccggtccccccgccaggccccattgccagcctgggcccctgcc[137 bp omitted]tcccaggttcaatcgattctcctgcctcagcctcccgattagctgggattacaggtgcccaccaccatgcttggctattttttgtatttttagtagagacagggtttcaccatattggtcaggctggtcttgaactcctgacctcaggtgatccactcgcctcagcctcccaaagtgccaggattacatgcatgagcctccacacctggctgtaaatgcatttaatggatctggccacatcctctctgcaagatgcctgctggtctctccttcaagcgcatcctccccctctacacccaccagtccccaggaagggtgatcacagtctccccccaatcctcccctccttgctcatgactctgccatgtcccaataccccccattgattggatgatggatggagtctcactctgtcgctcaggctggagtgtagcgcggcaatctcagctcactgcaacctccgcttcctgggttcaagtgattctcccacttcagcctcctgagtagctggggttacaggtacatgccaccacacccagctaatttctgtatttttagtagagacggggtttcaccatgttggcaaggctggtcttgaactcctgacctcaaatgatccgccttgccttggccctccgaagtgctaggattacaggtgtgagccaccacacttggccccccgatttaatcattcatgtaggctgggcacggccagccttgggaggccaaggcaggaggatcgtttgagccagaacttaagatcaacctgggcaacaaagagagacccccgtctctaaaaaaaattaaaaattagctgggcatggcagtacatgtctgtactcccaactacttgggaggctgaggcaggaggattgcttgtgaccaggagtttgaggttgcaggtgagctaagatcccgccactaaacaccagcttgggtgacagagggaggccctgtctagaaacaacaactttcatgccactgtctcccgtcttttccttaaaccaatttacttaagaaactaattcaacagtatcgcatatctctaaggaagacccaaaagattctgccctgccttgaaagtcaccagaaacattgttacaatgaaaatagtacccagttatcccatggtcgctggatactgttgcgaacaccagcagccggatgggattttgttacaaagagattggcaggtgttagtgtctgagatcaccctgaatctccctgggctttcttccctgacgtgttaggagctgaaagggagtcattgctggtgtgtgcagctctgggctgccggatgcctcctccagaggccacccccaaacagcccc[136 bp omitted]acagtgaaaccccatctctactaaaaatacaaaaaaaaaaaaaaaaaaattagccaggtgtggtggcgggcgcctgtagtcccagctactcgggaggctgaggcaggagaatggtgtgaacccaggaggcagagcttgcagtgagccgagatggcaccactgcactccagcctgggcgacagagagagaccccgtctcaaaaacaaaaacaaaaacaaaaaaagacaacaacaacaaaaaaccgtggctcacaggaggcaggaagcccaagttctcttcccaagggagctgtgtgggcctgaaccagtcctcaccactctctgggactcagtttccccatctaagcaccagggaaaatgggctcttggtgcccggggctgatttttgtgggtctgaagtctgtaaagatcaaggaaaccgaggcacaaaccagggaggtctccaaggcagggcttggtgtagctcctaattcctcctggtccccgtgcacaagggtgggatctggttttggtcacagctgaaactccagcacctactgtgtgctagagctgtcttgagtgctggggacacagtacagatcaaggcagataacctctcagggcttctgttctggggagacagcgacagatggggatagaggacaggggcagaggacacagcacgtgtaaaggccccgaggtgggaacgaacacactaagttctggaaaaagagagggggactggtgcagagaggggggctggtccagagagcgggcagagtgagtgagcaggggcaggatttgaggggtaataggagtgaggaccacggtggctcacacctggaatcccagcactttgggagaccaaggcaggtggatcacttgaggtcagtagttcaagaccagcctggccaacatggtgaaaccctgtctctactaaaaatacaaaaaattagctgggtgtggtggtatgcgcctgtaatcccagctactcaggaggctgagacaggagaatcgcttgaacccgggatacggaggttactgtgagccaagatcacaccactgcactccagcctgggtgacacagcgagactctgtctcaaaaaataataataacaataaaataaacagaagcgcggagggctatggccctccatgccatgtcagcatttgaggaatgaaaaactgtcacaccccagtaatgattcgtctctcagcatccctctagcatttataaggcacctactgtataccaggctctgggctgagcactaaggacacaagatgactgtgggaggcagacagggggccctggaagttaaaggccaggtcttggccaggcgtggtagctcacacttgtaatcctaacacattgggaggccgaggcaggcagatcacaaggtcaggagtttgagaccagcctggccaacatggtgaaacctccatctctactaaaaaaaataagaaataaaaaaataaaaatagccaggcgtggtggcatatgcctgtaatcccagctacttgggaagctgaggcaggaggatcgcttgaatccaggaggtagaggttgcgagctgagatcacaccattgcactccagcctgggcgaaaagaaactctgtctcaaaaaaataaaataaaaatacaaaaattagccaggcatggtggtgcacgcctgtagtcccagctactcaggaagctaaggtgagagaatcacttgaacccgggaggtggaggttgcagtgagctgcgatcatgccactgctctcctgtctgggtgatagggggagactccgtttctaaaaacaaaaagcaaacaaaaagagatcagggctgtaatgggggatgtcgcaaggcttccaggaagaggtgatgtctaagatgagaaggatgggagaaattgcgctgggctggggcagggaggttggggagtgggaagggtgtcccaggtagaaggaacagcatatgccaaggtctggaggcaagagaggtgtggaagaggaaacctaactagccctgaacaaaacagaaaaggagagggtggggaccctgggccaggtcccatcccatgggagaggcaactgagggacatggggggctggtgagggggggtggggtggcagaacttcccactacccccccagagctcaggtgggggcatgacctctctaggtggctccccaagctctcaggtcctgggtaggagaaggtggtctctctgaacaggtgttaggatctacacccaaccccatctccccaagacataaaaacccctatcaagcacttagcaggagcaaaacactcagaactgagctgggcatacagcaggtgctcagtgagcacatcagctattattccaggcttttcccaccatccaggcacacttactaaattctcctcagaacagctattatttgccgagcatggtggctcatgcctgtgatccctgcactttgggaggctgagaaaggaggaccacttgaggccaggagttgaagaccaacttgggcaacacagcgagaccctgtctctacaaaaaaatacaaaaattagccaggcagggtgaggcatgcctgtggttgtagctactcaggaggctgaagcaggaggatcacttgagccttggaggtcgaggctgcagtgagctataatagtgccactgcactccagcctgggtgacagagaatgagaccctatctcagacaaacaaacaaaaaaatccttgtgcctagaagctggacacggtggctcatgcctctaatcccggcactttgggaggctgaagtggtaggacagcttgagcccaggagtttgaggctgcagtgagtgatgatcctgccactgcactccagcctgggtgacagagggagaccccgtctctgaaaaataaataaataaatatatatatatatatatattttttttttaaaggcaaattccaattagccgggcgtggtggcaggcacctgtggtcccagctacttgggaggc[137 bp omitted]attcctcatgcctggaacagagagaaccagcagcacaataggtacaaatacttgaggaagggagggagtccctctaatgctcccctggaagcaacctctgccattaccatctatctttgtgtctttttctcatgaagttattgatcaaaggtaactctagaatacagggtgattttttttttttttgagacggagtctcactctgtcacccaggctggagtacagcggcacaatctcagctcactgcaacctccgcttcctgggttccagtcattctcctgcctc[213 bp omitted]gatattctgttcgaatcatggctgttcctcacatgacttgtaactactgagcacacgcagcccaggcctcttctcgcctgtggtaggatcttccgtggcaaggctgtgccttgggcgtttatcacccaattccctgtggacacttcggttgcctccattttttcccaacctcacccaatgccatggtgaatctccatgctgacatctcccaggtccccttggggaagcatttttgtctctcactggtgtccagtgaagggcagctggggtggaaggtcgggttacagcttgttctaaacaagcaggttcccctcctacacagtcggaaatgagtaggtcctaatagtccccgaggagacaattggctattatcttccgaagttaagtttatacattccctttaggcctgataacaccacctctagaaatctacccggcagacactttcccgtgaaatgacacgtggagaaagtactcacggcaaaaggcttgaagcaacctgaatgtctatcgataggagattggttaagtaaagaacagtacaagggggccaggcacagtggctcacgcctgcaatcccagcactttgggaggctgaggcaggaagatcacctgaggtcaagaattcgagaccagcctggccaacatggcaaaactctgtctctactaaaaatacaaaaaaaattagccaggtgtggtggccggcacctgtaatcccagcaactcgggatgctgaggcaggagaattgcttgaactcaggaggcagaggctatagtgagctgagatcatgccattgcactctagcctggccaataaaagcgaaactccatttcaaaaatataaatacataaatgaatgaatgaataaataaataaaaataacagtacaagaggtcaaataatgatcgaagagattagtatcttagtgttatgagatcagtatctcttagtgttatgagatcagtatcacagctgtgaaaaggaatgagaataccagatgtacaattataaaattacttttaagatactatatttttaagtgggggggaagaaaacaaggtacagaacagcatgtagaagatgctgccatttggttaaacaagggaatataaatccagccgcctactaaatgttcacagaagatttctagataaactgcgctcttcaaaaccgtagccacgagccgtatgtggctgtttaaatttaaacggaataaaatggaataaaatttaaaattcagttcctcggttgcactggacacatttcaaacgctcaatagccacattcggctcagggcgactgtaccacggtgcgtagacggagaccatttttatcatcgccatatcgggggccaaatccggcccaccgtttgtttttataaataaagctttattggcacatagccacgcccaccagtttacgtgtttgtctatggctgctttcacgctccaatggcggggttgagtagtagacagagatcatccggccggcaaagctggaaagatttacaaggtggtcctttatggaaaaactctactgaccctgttctgggaagagactgctactggggaaagagagaggggagaggatctggagattctccaccatgcatttttctctgcatcctcaattgtatcccatgtgtacgcattctctggccagaacaacatattaaaaataaaagacgtggtgtcacagagatgccgatttcttctcctgccagccacgcccggagggcctggttcccctcgacgctgccaccctggataataccacacttcaaacagttttgctaaatggatgggtgagaaatgatatcttgttttaatttgcatctcctgggcaggagatgggaactctttaactatagataaatgcccgtctaatcatccatcgtccccccagactccttaagggcaaggattgtctgcatcagtcactatagtgtccccagtcccagcatggggccaagcaaacagctgaagcccagtacatccacacggaagagagggaatcaggcccagggcagcagccacagtgcaaggcctgggctagttgtggctggtggtgagcatcgagtgccaagccaagcttcaccgacgcagtcacaggggcagactccatgcggcagaggtggctgccagcccctcggggaacctgcagactcacgttcagcagtgggggaagagagcagggtgggcagggacctggcagccttgggggtaggggaactgtgggctccaggcggggagagagattatatattcatcagaatcttaaacaaaagccccgcagccgcctgtcagccaggctatggcttttatggtaatcagcaatgaattacccacaatgcctggccaagcgcaagtggttcttggcccggatcctaaactaatttttgtatgttcgtgtgtatataattttgctcgctccctcccgttcctctcccttcattaccaggagcacgggtggggtacggggcagggaggcaaaaggaaccctgggtgtagaagtggaggatgctcaccaagaccccctggccctacagcctgcctggcactaggccctgggctcagagtgtgtggaggtgggaggtgagtgccaagtgggaactgaggggagcctggaaaccaccaaaaactggagctggcagctccgggggtggagagagaagggaggaagggggggttggctggctctggtggtgagcagagtgtgcaggccccttagtggggttgagcctgtgccacgtgctgtgtggccttgggcaagtgccttaacctctctgggcttcagccccctggtctgcaaattagacctcccttcctgtcctaacctctagccccatccagccccaagtgtgtagcccacagcccctcccagggccctgtctatgcaggccactctctaagtgcttgacgcatattaactcgttttgttgtgccagttatttatctcagatggggaaactgaggctgaggataggatgtgccttgtccagagccaatggcttgcttgtagcacctgaaaacccgctatgggctaagtcaggagctgccaactccatgtctccagggagaaccagcccaccacttcctgggaacctccgcaggcgtcctgctaatgggggcgtttccatgcctgcctctctcaccatcttcgccacctcagctcatcttctccgtctttaccgatgttcaggacagaggcctgggagtcgttcttgactcatctcaaccctaccctgcagccaaccacttggagaagccagccaacccttctgcaaaatccttctagaatacaacccctcctctgcccctgcctggtccacccccatcatccctggcctggatctgtgccgtcccctctgctctggtcccccagcgtctgcactcatcccccacagtctgtcctttctgcaacagccaggggtcgcctgtgaacacgtcggtcagggctggttcctcctttgcccatagccctccctggctcccacctccctcagagtaaacgcccaagtcctcctggtgccccacaagggcctgcacaacctgctctgtcctctccctgctctcccctcccctcctccccctcctcactctgctccagccacacaggcctcctcgctgttcctccaacatgccaggtgcggtcctgcctcagggcctttgcacgggctgtgccctctgcctggaacaccctcccctcagatgtcagcaaacatcattctcttattcctgttggtcttactgaaatgtcacctcttctgtgaggcctgtcttgattctgtagctaaaacagcccctccctgccaccaaccaattcctctagcttttttcttttctttttttttttttttttgagatggagtcttactctatcacccaggctggactgcagtggcgcaatctcggctcactacaacctccgcttcccccgttcaagcaattctcctgcctcagcctaccgagtagctgggattacaggcgcccaccaccatacccagctaatttttgtatttttagtagagacagggtttcaccatgttggccaggctggtttcaaactcctgacctcaagtgatctgcccacctcggcctcccaaagtgctaaaattgcaggcatgagccactgcgcctggccaactttatttttcttaaaggcatggcatacagtcaatccttaacacatatttaatctattggctttatggcttttgttttttgggtgtttcttgtttttgttttttgaggcagggtctcactctgtcacccaggctggagtgcagtgacgcaatctcagctcactgcagccttgaactcctcagctcaagtgatcctcccacctcagcctcctgagtagctgggactataggcttgtaccaccacacccggctaatttttgtatttttatttattattattattatgaaaccaagtctcactttgtctccagactggcgtgcagtggcgtgatctcactgcaacctctgcctccctggttcaagcgattcccctgcctcagcctcccgagtagctgggactataggtgcatgccacca[138 bp omitted]agccttttgtatttttagtagagatgagatttcaccatgttggccaggctggtctcgaactcctgacctcaggcgatctgcccgtcttggcctcctaaagtgctgggattataggctgagccactgcgcccggcccctatttgttcattgtccttctgatgcattccacgagggaagggtttttccctctgtcttctccgtcactctgttcccaacacctgaccctgtgaggatcagggcctggtatataggaggtgctcaataagtatccagtgatggagctctaggcccccagcagggtcctgggcccagaaaggacacgacggttgttttctgaacacacagaagctttccttggggtctgaaggaaaattttagacctgaaaccatcccctgggtggaggctgggggtggggatataagtatcttgggagcagccaaggaaagaaaaagaacattcctgtctcatcaaagctgttcaggggagacccgagctccctggctggcggctggggtggagatggcagatgctctctgcag[227 bp omitted]gaggcaggagaatggcgtgaacccgggaggcggagcttgcagtgagccgagatcgtgcgccactgcattccagcctgggagacacagcgagactccgtctcaaaaaaaaaaaaaagaaagaaatacgcatcccacatgacatctcctggttgtgcgtgaggcctgtgtgtgaacgagccctgcaacacatctcataggaaagcaaaagagagagacaaatgggcatgtccgtcaggaggggctgggcatgtagatggcatactacacagccctgaaaaagaatgcatagtacgcagccctgaaaaagacatccctggctgtgtgcgtcctggtactgtcagtgaaagagcatggcagggacagcgggcataggatgtgtgggacgagaaggtgagcacaatatgccaatatttgcaaatgctataataatagcagcagggccaggcatggtggctcacacctgtaccctagtgctttgggaggttgaggcaggaggattgcttgagcccaggagttcgagaccagcctggccaacataatgagaccttacctctacaaaaaaatacaaaaattagccaggcgtggtggcgcatgcctgtagtcccagccacttgagaggccaaggcaggaggactgcttgagcctaggagatggaggcggcagtgagctatgatcacaccactgcacttcagtctgggcgacagagcaagaccctgtctctaaaaaaattaaaaataaaaataaaataatagcaatagtaacaataactgctaatatttataggtcacatactgcgtgccaggcatggttcaaagtcttttacacataatatctcattgaattcgaattgtctccattttacagatgaggcaactgagcatcggagaggtcaagacacttgtccaaggtcacacagcatggcggcagcagaggggggacatgagtccaggctgctgagccccaaaacctggcctaggatttatttatttatttagacagagtctcactctgtcgcccaggctggagtgcagaggcacgatctcggctgactgcaacctccacctcctgggttcaagcgattctcctgcctcagcctcccaagtagctggaataacaggcgcacgccaccaactccagctaatttttttgtatttttagcagagacagggtttcaccatgttggccaggctggtctcaaactcctggcctcaggtgatccgcccgactcagcctcccaaagtgctgggatgacaggcatgagccaccgtgcccggtcctggcctgggatttggtgacaacgctcgctgacagcctacgcctgatccctggtaaaaacagcagacgcctaataagtgccctggagatgctcaagggcaaagtgagcagagacaggggtgtacccaggaggagatggtgagacttaagagagtggtccattgcacagggatgggttggacaatgctctctggggaatccacgcagtcagcacacacgcataggaaaccgggtgctggggagcgaggcggctggctcgtcggaaaacaaatcgctgccagtctcatttcctcctgtgacagagatgggcaggcctggccggggccgacggctggcactgagccagagtcaacggggacctccctacctgtctccgtgtgatgtgtttatcaagaggacgggaaatgtcacgaccatcaagggcaggcggcaggaggggctggtgtgggcgcttcttagatggagtggggagggcctggcccaaggtcaaggtggcccctggagagccttttctccttcctgcctcagcggaaccaacccaccgttcaatccatgcttaagaagaaaccctgcaacgtggttctaagaccacaggtttgctgggcacgcagtggctcacacctgtaatcccagcattttgggagcctgaggcaggcggactgcttgagcccagcagttcaagaccagcctgggcaacacagcaagactctctctctctctccacaaataataataataataataataataataataaataaaagtaaaaaaattagccaggcatggtggcgtgtgtctgtagtcccagctactcagtgggctaaggtggaaggatcgcttgagcccaggaggtcgaggctgcagtgagctacaatcacagccactgcattccagcctgggcaacagagcaagatcctgtctctatcaatcaatcgagaccacagcttcagctgagttcagtgccagtctctgctccttgaacactgtgtgaccttaagcatgtcatttcccttccatgaacctcagtaagatagagtcgtgacctccctgacttggatcaaccttctgagtcatgctgagcagcacgaactttggattcaaagcaacccagagtctgcatcatgatttggcctcctcttagctgtgcagcctcaggtataaatggctcaatctctctggatctgcttatcttgtttgagcccctggatccaactatgcctgaaggtggtccattctaacatcagcctttttggttcaagagccaatcaactccccagcttttcactaatgtcagtttgatgtgggtttctccacctttcttatttatttatttatttaaaaaaaaattttttttttttgaaacagcatttcactatgttgcccaggctggtcttgaactcctaggctcatgtgatcctcctgccttggcctcccaaagtgcctgggattacaggcatgaatcaccacacccagctgtttctccacatttcaagttgtttctccacctttcaagtccactttgtgcctgaggacagagccttgttagtagccagggcagagagctgaagattcgagacatcacaggttatccctgctcaacaggggcttcagatcaggggcttagatcaggggcttcagatgaacctcaaacctctgacccttggatcattcagaacgtggttgctggaaagcaacacccacatggcgtcattcagatttgggactgaggacagttcccaccaactgaatatctaccatgatgcatttagcgagcacctactatgcactaggcccagtgcaggccacaaagtgaaacaactgatgcttcacaaagaccttgtgtgggaagcttttgcccatgctgttccatctgcctagaacacacttccctcccctcactgcccagttaactccttctctaccttcacttcttagatcagccaccgccacctcctccaggaagccttccctgacttttcctcccatcactcacgcccagagcctcccattctctattcccctcccttatcaatctccagcaatttccatattttattgcaaaagtagaaataaaaaaccctgccacttaaa[138 bp omitted]ccttgacctcctggcctcaagcaattctcttgcctcagcctcccgagtagctgtggccacaggtgtacaccatcatacttggctaatttttaaaatttttttcagagatggggtcttgctatgttgccctgcctgatctggaactccaggccccaagcgatcctcccacctcagcctcctgagtagctgggacaataggcaaatgccatcacacctggctagttttttgcagagatggcgtcttgctatgttgccccacctgatctggaactcctggacccaagcaatcctcccatttcagccttctgaggagctcggaacacaggcacacgccatcacacctagctaattttttttttaactttttgcagagatggggtcttgctatgctgccctgcctgatctggaactcctggccccaagcgatcctcccacctcagcctcctgcgtagctgggaccacagctgtacgccattacacctagttaattttttaaaaaatttgcacagatctggggccggggtggggggtggtcctatcttatcctgcctagtctagagctcctggcctcaagcgatccctcccacctcagcctcctcagtagctggggccacaggcacacaccatcacacctggctaatttttaaaattttctgtagagacagggtctt[131 bp omitted]tgaacacttttctttcctgaactacatacgtaaatggaaaatgtaagtcaaataaatggttcatgtttcctgaaaagtcctgtgtcccgagtccagctctcctgaatgcctcttgccccagatttgctgattgggtttttttttctttctttcttttttcttttgagacggagtctcgctctgtcaccgaggctggagtgtggtgctgtgatcttggctcaccgcaacctcggcctcccgggttcaagcaattctcctgcctgagccttccaagtagttgggaccacagactcacgccaccacgcccggctaatttttttatttttagtagagaagagttttcaccatgttggccaggccggtctccaactcctgacctcaactgatccacccgccttggcctcccaaagtgctgggattacaggcatgagccaccgcgcctggcctaattttcgtatttttaatggaggcggggtttcaccaggttggccaggctggtctcgaactcctgagctcaggtgatccacctgcctcagtctcccaaagtgctgggattacaggcatgagccaccacacccggctgtgatttggggttctggcacccggctgtgatttggggttctgcacacatagcactgttgcttgcactcccaggcaccggggacctggcttctcccacgggcggctgccccactgccccgggattttcctcctagccacgctgagacgtctgttctgagggatccacgaaggataccaactatagctggggctcctgctcaccctcccatggcccaaacatcagggtttgtcaactcacactttgagggctggagtggccatggcgggacattaggaagaaccactctacccaaaacaatgcctcatgcatagcaggcactgagaaaatattacttgggtaaacaaataaatagctgagcctggccaggcgcagtggctcatgcctataatctcggcactttgggagggagaggtgggtggattacttgaggtcaagagttcgagaccagcccggccaacatggggaaaccccatctctagtaaaaatacaaaaattagccaggcgtggtggcacgcgcctgtaatcccaactactcgggaggctgaggcaggagaatcacttgaacctgggaggtggaggttgcagtgagtcgagattgtgccactgcaccccagactgggagacagagcaagactgtctcaaaaacaaaaaacacaaaacattgcacaggaaatgagcaatcagagaggttgggcaatggccgcaaaatcacacagctaggaaagaggtgacggcaggatttgaatccaggactaacagaatcctagattttccactggtccaggtggctactgacagcacaaattttcctaaaataggacagggcagggcagggcccaagcaaacatctcaaataagagaacccaaactcacatagatctttaaagtaagagggtggggtgtgtggcccacctagaaattagtaaggggccaggtgcagtggttcatgcctgtaatcccagcactgaggctgagacaggtggatcacctgcactcaggagttcgggaccaccctggccaacatggtgaaaccccgtctccattaaaaatatgaaaattaggccaggcgcagtggctcacgcctgcaatcccagcacgttgggatgcc[134 bp omitted]gaggcaggagagtgacgtgaacctaggaggtggaggttgcagtgagccgagatcacgccactgcactccagcctaggcaacagagcgagactccgtctccaaaaaaaaaaaaaatgaaaattagccaagtgtggtggcgcttgcctgtagtcccagctactctagaggctgaggcaggaaaatcgcttgaacccaggaggcggaggttgcagtgagcaagattgtgccactgcattccagcctgggcaacaaggtgagactgtctcaaaaaaaaaaaaaagaagaagaagaaatgatggaatgatgaccgtgaaatgctgcgagacggaatgaggacaggacagaacaggctgcaccccagctaggtccaacagcaaggcagtctggccatgctgtgtgaccctgggcaggtgactcgactctctaggcctcagtttcctcatctgtaaaatgggtataaaagtctcttcctcccctcacatggctgctgtgaagactgaatcgaaaggcacacagagctgttcacaccacctgagaagcagctgatagactgcagatattatcttggtggtggttgttattatttgtttttattttgaaagacagggtctcgctctgtcacccagactggagtacaatggtgagatcacagctcactgcagcctcaaactcctgggctcaagtgatcctcccgtctcaacctcccaaagtgctgggattacaggcatgagccattgggcccagctgatgttatttttaaaaaagtttttcctggcctaggctgtcagggtgtctagcaccctattccccttgaattgctaagtgagaggcccacactgcaatctcttgatctgtttgtattctccatttaacagacagtgagtccctggagggcaagggcctggcctgccctcccctccatatttgtccctgaaattctgagttctggaaacttctaatggaaggatcgaagagaaagcatcagctcagcctggccactaaccccagacatggaaagaaaaaaaggagggatactctaccttcaaaagccatcccaaggccgggcgcagtggctcacatctgggatcccagcactttgggaagccaaggtgggcagatcacccgaggtcaggagctcgagaccagcctgaccaacatggcaaaacccatcactactaaaaattaaaaaattagccatgcgtggtggtgtgcgcctgtagttccagctacttgggaggctgaggtagaaggatcacttgagcccaggaggtggaggttgcagtgagctaagattgcactgcaccactgcagtccagcctggacgacagagccagaccttgtcttttttttttttttttttttaaaaagctatcccaaatccacttgcttcttctccccaccacccacctttgccttcacctggtccatccctggcatcaaccatgagtatctgagtcaggtcctgtccctcctctgcccacagccctccatagctcccacctctctagggctcaaagcccagggttctccctgcagcccacaagaccctacatgacctattgcctcctctcccctccccatcactcactgggctccagccacacaggcctcctcgctgttcctccaacacgccaggcgtggtcctgccccggggccttggcacacgctgtgccgtctgcctggaatgctcttcccccacgttatctgcttggttcctcctcacctccatcagggctttgctcaaacatcacctcctcaatgaagccgtccctacagccccattaaaaatgacaaccctcatgcctccctcccgagtcccctttgttcctttactgctttctctgatcacccctgacgtgctatatatcgtattttgcctatcatctctctccctgatccacaaagccatcccctttattgcttcagggtcccggcacagagcctggtggacaggaggcatctgagaaatccccccagatgatggaaagcgcaaaatcggaggcagtggctgcggccaaagcagccgctgagaccccggaggctgacggcggaagcctccacgcctactccagccggggccttcctgtccctgttggcaagccaggcccctgccctctgccatccggcggctcaacacctgttgtgacacagcaggaagcaggggcggcagccagtgcccgtggccttggctggacaggtccctccggcaggtttaatccctgccccagtgggagagggggtacacggaccttgaagccaaacacacaggctgacacaagcaccatccacttggcttatccggctcccgggaagtggccagtgtagggacaagcctgataaacatctagcaaataaatggattttttcttttttaattgagacggagttcgctctgtcccccaggctggagtgcagtggtgtgatcttggctcactgcaaactctgcctcaaacgattctcctgcctcagcctcccaagtagctgggattacaggtgcacgccaccatgctgggctctcatttttgtatctttttagtaaagatggggtttcgccatg[137 bp omitted]ccagccctgatttgagggcttcaccctatgaactcactagatcctcccaagggagcctggatggttgaggttatcattatcctcattttccagatgaggaaactgaggcccagagaggtggagtcattgctactaagggacagagccatctggccctagaatctggttttggccactaatcaacacagtctcaacgaatgagaagaataaaacaagggcccggtgctggctcatgcctgtaatcccagcactgtgggaggctgaggcaggaggaccacttcagcccaggagttcgagaccagcctggacaacataacaagaccttgtctctacaaaaaattaaacaacaacaaaaaaattagccaggcatggtggtgtgcacctatagtcccagctgctcagggggctgaggcaggagggtcaactgagcctgggaggttgaggctgcagtgagctatgatcatgccactgtactccagcctgggcaacagagcaagaccctgtctcaacaaagaaaaataaaaagaataaatcaaggtaacagggaaatgtgagtcacgtctacggagcattccgacctggggaaaagggcagctatgcttcatctccctgatgtctcccgacccagtgacatgggcccattttagggatgaggaaaactgagtccctcaagggggaagcgatttcctgaaggatctaccgcctagaagtggcaggctcagagctaatgctaaattcactaaaccctgacccagatcgactacagggtcattttgtagaggcctcagtgctgtaaggagtttggctcgtgcctcgtgagtacccactgtgtgccaggcccagagtggagaagcctcagatgtctcatttccagacaggtaaactgagactgagaagttcagctatttgcccaagccctgagatgtccccattttacaaacaggtaaactgaggctcagagaaagaaccatttatccaagcgccaaaattgtctccatttccagatgggtaaactgaggctgggaagttcagctatttgcccaagccctgagatgtcctcattttacaaacaggtaaaccgaggcttggagaaatagaaccatttatccaagccccaaaactgtcttcatttccacataggtaagctgaggctgagttcagctatttgcccaaaccctgagatgtccccatttcacaaataaactgaggctcagagaaatttaaccatttatccaaaccctgaaattgtccccatttccatttgggtaaactgaggctcagagaggtttcaacagttgccagaggtcacacagccggcaagaggcagcactgagcctcaaatctgaggtttcctgacctgacagggaactgcaggccccacggtccccgcctgagctggcgtgagcctttagcggaagccctccccagctctgcacagcagacaccctcgcggccgtgccttgctggagtatccacagtgacacacagccctgttggtggctgggctttttcaggcttaaaagggaggtaatatcacctaacaccagctatatttttaaaaaccccacagcactcaggaggctggcccgtcagcgcagcaccacgtccgtgggcaggcagaggccccggaactcgaggacgtggctattttaaaggggctatttctggaggctgaggtgagaatgcgggggtgggaggaagaagcagccgcggggaccgactcgagcccgccccgactggccgactcccgggttgggggtggttaaaagcaagaacgtggaagccacctgctccccgcaagcactgcctccagcccgcagaaagacctcaggcggccgggcgcggtgctcatgcctgtcatcccagcactttaggaggctgaggcgggcggatcacctgaggcagggagttcgagaccagcctgaccaacatggtgaaaccctgcctctactaaaaatacaaaattagccgggcatggtggcgcacgcctataatcccagctattcgagaggctgaggcaggagaatcgcttgaacccgggaggtggaggttgcagtgagccaagatcgtaccattgcactcaagcctgggcaacaagagcaaaactccgtctcaaaaaaaaaaaaaaaaaaaaagaagaagaagaagaagaaaaagaaaaaacagacctcatgcatttcagagcctcatttcttcccctgggaagagctgcttaggcaaaatgtatgcctggagccctactgtgtgcagatgctgccatggacatggtagaggaggagagaagcagataatgagtatgaagcattcgaggctgggagaggtggctcacgcctctaatcctggcactttgggaggccgaggagggcagatcatttgaggtcaggagtttgagaccagcctgaccaacatggcaaaaccccatttctactaaaaatacagaaaaattagctgggcatggtggcacatgcctgtaatcccagctactcaggaggctgaggcaggagaattgcttcaatccgggaggcagaggttgcatgaaccaagatcacaccactgcactcccgcctgggtgacagagtgaaactccgtctcaaaaaaacaaacaaaaaagcattcaacagagaaatggtggcaagggctttgagtcaaagagagcagaagggggaagacaggaaactaggtggtggggcaggctgcaagtttaaatagggtgatcggggaggcctcatttaaaagtgacctgagacgtgaaggaagtcagggaggttgctgtttggggaaaagcattccaggcagagggcacagactgtgcaaaggccctggggcgggaccatgcctggtgtattggaggaacagcgaggaggcccgtgtggctggaacagagtgaggacggggagagaggaaggaggggacggcagggaagggatggagcaggttgtgcaaggcctggtgggctacagggaggacttggggttttcccccaagaggtgagagccatagagggctataggcagaggagggatgggacctgactcaagaactgaaagatgtcattgtgggaagacagactgtgggaatgagggctggggtcacaccagagcagaggtgaccgtgttggtccaggtgatgatgggagctggaccaggtggaggcagaggatagaacaaaaatgaaaaaatgaaggccacgtgcagtggctcatgcctgtaataccagcactttgggaggccaaggtgggtggaatgcttaagctcagaagttcaaaaccagcctggccaacatggtgaaaccccatctctacaaaaaatacaaaaatcagccagcatggtggcacgtgcctgtcattccagctactcgggaggctgaggcaggagaatcgcttgaacctgagacagaggctgtggtgagccaagattatgccactgcactccagcctgggagacagagcgaaaccctgcctcaaaaaaaaaaaaaaaaaaaaaaaaagaaagaaaaaaagggaaagcaagctggcctgtgtacagtactcagcgcacagtccggcacacagcaagtgctcagcatacattggcttgtattatttttagggtcttaggctctgtactctgaacctgaaacccgcttcccctggcaggacccaggagaagacagtgacccctgtgcctgggagcattttgtgtatggaaggggacacagttttcactctcatgtccctattggcctgtcccaggctggcggcagctgatcagaccagggccagatctgatggttgcaatggaggaggagaggagaaggaggtagtgacccatgggttaaaggggggaggcccccaggtgtgtcaggatgcagccctgccacaaagcgtggggtcagcccaatcctaactcaactctacttgctgtgtgaccctgcacaagtcacatcccctctctgagcctcggtttccttatctgcgaaagtggggcagtggttgcaggcttctcacagggctgtgcagattcaacaggaccacgaggcactcagctagaggtgggatccgtgtcagcacccatcatgcttggtcgttcaccatcatccccatcctcacactgtttgcaaaacttcgagtctggggtctctggagcacaggggcaagaagagccacatccccaggagagccacatccccagaaggtgtcccaaggttcatgttctgccaccgtttggatccagttgaattgcaaatgccagaaaaagcacaaataaggaatgatttctcttttcacctaagggaagctgccaggttggccattcagggttattttcccctccccgacaatcactggggcccaggccccttccacctctttgatcccccattcttatctatgacacctgcctcatggtccaaaatggctgcctgagcacctgccatcatctccatattccagctgacaggtagagaggagcatgtgccacttctcttgaaaggcatttccagaaaatcctgcttatttacgccatgggtcagcattgaatcatatggcacagacagctgcaaggtgcactgagaaatgttttctttcccccaggtggccatgtgcccagataaaaattgtaaagttcaactgctacggagtcgggggatatgatgggatattgggagatcccgccacaatatctcatgtgggccatggggccaggtcttgggtctcaaaccagcgcatctgagacattttaacctggaaagagaagagagacgtcatcggggccggccccctgcctccacaccacgacggtttcactcattccaacatccacctcccaaaagactccaaggtcagaagcagtggccacgacccaagcacaggctctgcccaaggcgtccccaaggacaggcccccaccggcaatctgtgctccccaagcactggggctgagccaccaagcacccccattcagcctccttcctgcctgccgaggacaccggccaattcatctccttctcctcagtaaacaactgtcagggaaaataaatagtttttaataggctcattaattgaattcaggaagaaatcaccttctccccaggccatggggaagcaacgctcagttcaagaaattcaggccgaaggcagaaggggctcagcctcccagaaagtccaggagatgccccaaacagttgtagtcacattcaataacactgggacaggcatggtggctcatgcctgtaatcccagcacctggggaggctggggcaggcagatcacttgaggtcaggagttcgaaaccagcctggccaacatggtgaaacgctgtcactaccaaaaatacaaaaattagccgtatgtggtgacacacgcctgtaatcccagcatctcgggaggctgaggcaggagaatcgcttgaacccgggaggtgggggttgcagtgagccgagatcgggccattgcactccagcctgggcgacagagtgagactccatctcaagaaaacaaaacaaaatactgactcaaccagcaagggggtcattctgtgctgggcttaaggctaaaagcctcaggtgggtgctaggatgtcttaaacacctcaggggtgctcaggcttcagctttcagcctggaacagacagaggcaaaagcagcaagaatttaatgcccttgttttgctctcaccacatttatttttaaggttgtaccttcaaggacataccaggtttccgttcacaagagcaagacaaagttttctcttttacgttttaaaagagaatgggtttaaacaaaacgtgtcaagtactggctgggcacggtggctcgtgcctgtaatcccagcgctttgcgaggctgaggcgggaggatcgcctgagcccaggagcttggggctgcagtgagctatgatcgtgccactgcactccagcctgggtgacagagtgagatgctgtcaaaagaaaaagaaagaaaaaaaaaagaaacgaagaaaagaaaggaagagaagagaaagagaaaatgagggagaaggaaggagaaagaagggaagagaaggaaggaaggagggagggagggagggaggatagaagtaaagaaagaacaagagagaaagaaagaaaaaggaaggaaggaaggaaagaaggaatgaagcaagcaagctagctagtccttaggcgatggggcagcaaaacaccagatatagagtccaaagaccctgcagagtgacctcggcacagacctagagagtcacaactgaccctccacacctgctgagggttctgtccacattgacgtgactcagtttccccactgaggctgaggtggtccaagggtagccccgctcgcactcccagcccagctcctgccagcgtggcagcctgccctgcgactcggtctgcgcagggcttgccgtaggtgcccgccaatctgctctccgcactgcagtgggcacactccaagcgcaactcaataccccggacacagcgactccccagcgcccccaagccccatatgcaggtcctgcgaccttgcttccagagggcactgatcatcaagctgtattttatgatatcttagccagtttggggcttactccaagcgtgtttagcatagatccttccaataccaagacccttctacccaagagacagcctcacccccattttgcagacgagaaaactgaggccctggagggtgaaaccactgccccagggtcacactgaacaagcagctcagacatgattcaaacttgcaccattcaaatgctaaacccgatcccccaaagatcccctggcccattcctggtgagctcctcagtaacttctccacctgtctggccagacacacagggtgcccaacatccatcaggcctggctcagttctttttgtttttagagacagggtctcgctctgttacccagagtgcaatggggcatgatcatagctcactgcagcctcaaactcctgggctcaagcaatcctcccacctcagcctcctgagtagctgggattacaggtgcacaccaccacacccggctaatttttttactttttatagagatggggtcttcctatgttgcccaggttggactcgatctcctagcctcaagcaatcctcccatctcagcctcccaaagtattgggattacagccatgagtcaccatgcccgggtactggttgactcttaaaatcatctggcccaaccactgtacactttctgggggtccccagaccctttgggcctctcaccttctcctcaggagacaagaaatctcacagactgttttagagttccctgacctcctgacactggtcctcagacccctggcttgaagccaattactcagagacatcaccctcaaagccattccttaccacttcttttgtttttttttgtttttgttttgagacagagtctcactctattgcccaggctggagtgcaatggcacaatcttggctcactgcaacctctgcctcccgggttcaagcgattctcctgacttaacctcctgagtagctgggattactggcacacaccaccacggccagctgtatttttagtagagactgggtttcaccatgttggccaggttggtctcaaactcctgacctcaggtgatccaccagtctcggcctcccaaagcgctgggattacaggcgtgcaccaccacagctggctgtatttttagtagaaaaggggtttcaccatgttgctcaggctggtctcgaactcctgacctcaggtgatccacctgcctcagcctcccaaagtgttgggattataggcgtgaaccaccgcgcccggcccttaccacttcttgccagacactacggatattcatcagctcagagagggtgagcaagtagctgagagcacacagcatttccgctgggaacccagtctcctggcctccctgcccaagggcagagtgagctgagctttaatcccagcactttgggaggctgagacaggtggatcacctgaggacaggagttcaagaccagcctggccaacatggtgaaacccagtctctactaaaaatacagccagccatggtggtgcgtgccagtaatcccagctactcaggaggttgaggtcactgtggctgcctctccctgcaacatcacccactccgagtactctcagagcaggaccagggggctcttgctgtgagctgccgaggcagggctttccccatcattacctgcctgatcaaggtcattagacgtggcaatgctggtacacgcaggccaggcggtagctcccaggagccagacgggctgatctggaggggcgggtgaggtgtggcggagcttaggtcctaaaggggttgcagacagagcgatatcgtgagggaaaacaaaacggggtgcgggaggcaatggcggggtaggggtggcctggccagaaacagagctcccggcagagcaaggacaaaggcctggaggtggaaacaggagaaggataggtctacatggagtggaacggacaaaggggaggggaagaggaggagagatgaggccagcggcccacagagaggagtctgagggtgccatccagagagggaaagtgacttccccgaagtcacacagctcgtaaggggcaaaaacacatcctggccgataacatctttgctcccagccactgtgggaagtggcctctggctacatcgtagctaacaatccagctacagaattgcagcccccagtgcaaaatgaaaccgtggggttttccttgtttaaaaattattaaggccgggcacagtggctcacgcctggaatcctagcactttgggaggctgaggcgggcagatcacgaggtcaggagatcaagaccatcctggctaacacagtgaaactctgtctctactaaaaatacaaaaaattagccgggtgtaatagtgggcgcctgtagtcccagctattggggaagctgaggcaggagaatggcgtgaacccgggaggtggagctggcagtgagctgagatcatgccactgcactccagcctgggcaacagagcaacactccatctcctaaaaaaaaaaaaaaattaagaatttccaggtcgggcatggtggctcacgcctgggatcccagcactttgagaggccgaggtgtgtggatcacctgatctcaggagttcaacaccagtctggccaacatgctgaaactctgtctctaccaaaaatacaaaaactagccgccgagcatggtggcacatgcctataatcccagctacctggaaggctgaggcagaatctcttgaccccaggaggtggaagt[132 bp omitted]cccttctgatcgtgggcccccgagtgactgcagggcccccgtgaagctgggcctgggtgcagcctccaggagtgtagaaacgacatcctgtccagaaacaacgcctctgtaaacctgagaaagggcttgtcattcccagttctcacccttcctttgtgcctcagtttccccatccgcaagacaaggggacacctgccacctctcagggcagttctgaggaggaaatgagaaaacacagggccaggcacactggtactggtggcggagcattagcggcccccaccacgggggactttccgcccgcttgggttagttctcctctgttgcagctgtttggagaatgtgggtttgaggttccaacctcatcacccctaacggttcacgaagctgtggggagagagggtagactcatccagctcctcctgtgcaccttgggctcctggccccgttatcaatgtgacaccactgaattcccagtgatgcagcaggcaagactcgtccccatttcacagatgagaaaactgaggctcaggggaaggaaataatgaggtcatctcacacagccagggagggtctttgtcaggatccgaacctggggcgttcagacccctaatgcccttccccagcagggccggagtctgggctcccagggccagatggggccaagagaaaaagtcctgggacctggcagcctctctgcaccctgctgatatctgggagttgaagccagcactgttgccggaaaccccggcagttcacactctctagaattcatccgacaggggcaattacccacttccaataatcaatggggcagtggaaccaggacagatgtgcagagggaacccattagcaatctaagcgttctggccccgcgagacgtcagggagcgtgttgggtggacgctcagggacaaaggcaccatctgcctgatttctctcgctgtcttgggtcttcagcataagtcagggcttctttttttaaaaaaaaaaaaaaaaaaaaaagagaaggccttgctctgttgcccaggctggagtggagtgatgcaatcatagctcactgcagcctcaaactcttaggctcaagcaatcctcccacctcagcctccccagtagctgggaccgtacgtgtgcaccccaaccctcggctgatttttttttgttttttgtagagatgaggtctcactgtgttgcccagtctgatcttgaactcctaggctcaagcaatcctcccgctttaacctcccaaagtgttgggattatggacgtgagccaccatgcctggcaaaatcagggtttctaaacctcagcacagtgtacatgagggtggggtcattatctgggatggggtcatcctggccattacacagagttgagcagcatctctggcttccacctactccataccagcagcacccccctggacatgacacccaaaaatgtccccagacgttgccaagtgtgcccaggggagcaaaagtgaccccggctgagaaccacagcagtacactcaacgagtaatactggtaacccgggtgctccagccccaagagcaaacgactgcgctacagaaagaacgagggatggagaagcaggtcctgccgccagtagataattcgcagccctgccccgcgggacagccggcttccttctacgcagtatttaatttaagtcaagtttatcattatgaccaatattaatataatcagagccaacgtttatcgagcgcggacgctggcccaggccctgttctcagcactctctgtaagctatcacactggtgcctctaaagaaccgcagaggtggctgggagtcttaaacccatttcacaggcctggaaactgaggcccgcggacggcaatggaggtgtcagaagtcacgcaacttttaattgttggggaaggggtcaaagtccacggtggccctggatttctgtactgtgccatgttaagatgtttcaacccaaggatgttaaaatagggcaatttttttttttttttagacagagtctcactctatcgcccaggctggagtgcaagtggcatgatctcagctcactgcaacctccgcctcccaggttcaagcgattctcctgtctcagcctcccaagtagctgcgattacaggtatgcaccaccatgcccagattatttttgtatttttagtagaggcggggtttcaccatgtt[133 bp omitted]tttccttggaaaaaccaacagatctggccctggagccattcagggcttccttggaggttgaagaagcctttttggcccatacgacccgctggagtggagactccagccctgacaggcgttatggcttgagaatcacacacccgccatggcttcctgcctcggtttctccctttggactggtgaaaggggtccctgtccatcctcctgcgcaaggcccagcagcaggcaggcaggcatggctgtgtggtcttgggcaagttgctctccctctctgggccttggcctgacagatgttccaagaagcattcccaacattccaggttttctgttgatcctgatgttggcagcccagctctgggggctttcagagaactctgaccgcacatctaaaaaatgcaatttgttagacgcggtggctcacgcctgtaatcccggcactttgggaggccaaggcaggcggatcacttgatgtcaggagtttgagaccagcctggccaatggggtaaaaccccatctctaccaaaaatacagaaattagccagatgtggtggcgggtgcctgtaatcccagctactcgggaggctgaggcaggagaaccacttgaacccgggaggcggagattgcagtgagctgagatcacgccgttgcactccagcctggcgacagagcaagactgtctcaaataaataaaataaaataaaaaataaataaaaaatgccaattcgccaggtgtggtggctcacacctggaatcccagcattttccgaggccaaggcaggcagatagcttgaacccaggagtttgagaccagcctgagcaatatggtgaaacccatctctacaaaaaaaaaataaataaataataataataataataataataatacaaaagtcagctgggcgtgctggtggatgcctatagtccccagctacttgggaggctgaggtgggaggattgcttgagcccaggagttaagacactgcagtgagccattatggcatcactgcactccagcctgagcaacagtgtgagtcctgtcacacacacacacacacacacacaatgcgattcgaactccttggggtggggggtcctgtgtggtcttccccagctaaagtcaactcttctcttcttgtttccgcccccctcacctccagccacaaagcagcaggtgccactctcagtctctgtccttggtgccccccacaccagttcatctgtctccacttatgatagaggcaatgtcaaagcacccattttacagatcaggaaactgaggcacagaacagctttattactagcccaagccccacagctgcttagattctggcttccaagttccttagcagcaggtttccagcaatcctgatggaatgaatgaattaatgaactggtgaatattcgaatgaatgcatgcatgctcgctcgcacaccatgcttgtcaaccgatcactttcctgagtgcccatcaaatgactgctgttaaacccccaaatcccccccaaactcccccctttggtgatcactcgggcccaccaggggctctggaagttgggagccacatgtggagtccctggagtgcctggagctcccaaggcagccacgtgtcctccctgtccaccatccaggccccctgtggttcagctcccgccagtcgcccagtcctgccgcagaagtggggcggccttgattaagcagccagtgaaggggaacgccccagtttgcagtggctgagtcatcctgacatctccctggtgctggaccccatcggggggctgagggcggggtagcggggcgcgggtggacactggagagcccctcttgggcaggtccttcaacatatcagtgtagctcccatgttgtcaaaaataataacaaaaacagaatagaggtggcagctacattctaggtgccgttctgaatctgtgcttacacacgttaactcatttcttcctcctaacaatccctcaaggtgggcactgttactcttctccatagacagatgaggaagacggaagcacagagaggttgagcaacttgccccaggtcacacagccaacaagtcggcagagccgggatttgaaccccatgcagcctcagtccagcatccttgctcttaacctctgagaaaaggcagtcaagagccctggggtgtgtgtgtgcggggggtgtctctgtagcgattcaggtggcccccgcagcagatggactgctgtccaaacaaacatccctgacaatcgggcagagctccttccaggcgttaggaatccaggttgtggcagccaacagcttgtgggctgtgtgaagtgacctcaggccagtgaaggcccctccctgtgcctcagtttccctctctgcaaaatagggctcagatcacagcaactccgctgacaggggacggcaggttggaggagacaaggatgctactgacttgcttacttagcagagggcctggcacggggcgccaactctaaatagtcggagcagctgttattatccccccgacatcccctcatttgctgatcacgggggttaattataagcggcattaaattatacacacacagacgcgccaacctcgcttccccagaacccctgaatttccgcaaactctcaattacccacgtgacagcgcgacgatgggccatcctcccagcctctctccccacagcctgcctcatccgagggtcccaggcttccagagccatggcttctccgcccgccggatacccctctgggtgtccaggagcggaaggaaggatgcatgcgactgactgcggacgcgttgagagccaggggaggcatgtttacccacagcatctcatgtcaaggctcgccgcgacgcagactgcgactgtactgatcttagagatgagagaacacagagaggtcaggcaacccgccctagtttgcacagctcaagtgaggagggtggctcaagtcagggctctgacctggaacccagaggggtaacctcattctgtaagtgaggaagctcctgcacggagaactgaaagggaagaggggaagtcatccaggaaggaaggaaggcaggcaggcaggtgagatctgggagaaaaaggggaattttcagttctccaggtagggggaacaggagacagctggcccttcctataaggggcttatggcaaagatcaaaaacaacttaaaaggagcaaggccacccagataacataaagagtacgagatgaaatctgtccccatgaaacgggacatttgtgatccagccccagttacggcgatggggaccggaggagggagtccccatgatccaaaaatccaggctctgaacccccaaccagggtgggatccgcgggaatcagaaggaaacaggaagccgcacagaaacctgggtttattttcagatgtggaatatcccctcggcctctgcggggcgcagagggtgccttgattccggggaacagaagaggggattccacggctagcccagaatagcaccagccccaaggtccagtctggccaggccacgatgttgggggaccggcagctccatggaggaggaggaggaggaaaaaaaaaaaagagagagacaaaaataaagcgatgtgaaagtggagggcctgtccgtgaatcactcctacccgttaattttcgcctttggagaagtgtaagccaattgatttttcaaattccccacacacaaccccctccccagcgcttctcaaatatcagccagagacaagacagaaatggtacgtcgggtttttttttttcttccctttttggttgagagtcttttctttccttaaaggaaaaggggggggggcgggggggaaaccacacactccacactcttgaacctcagggttagagagacccaggtgtcacctgtttcctagacattttggggctgccactctctgcgtgagacaacagccaccctttccctcgatcacatcccctacacttcacttcctctctccgtgtcccccttcctcaattcagaatgtcacctggtgataagatgacatgcatttgagcctcaatccccttccagcatcccctctcctctgccccgcaagccacaagctggcagctttccgattccagagcaaggtaaggtgtgaaaatgacaaaattcacagtttaaaaagcccttgaaaccttcaagccccggatacgtgccttggtccgtgaatccatggtgaatttttggtttttttgttttgttttgtatcagcttgccacacgaatcctgcgaggaacagcagttatgtcttaatctcctctcctcctgtccccaccggaggctgagccactctgcctggtgagcggttggagggtggggcggcggcgggtggtgggggggagggtctctcttcaaattcccctccctgggcatcttttgccgcagggaaggacggaggaagggcaacctgcacaggctttgcccgagaagggttctcatcctccttgcaaattctaagaggacacccacccattggaaggtgagccaggagcctaccctggatgcagaggagagctggggagtgcccctttctgggacccctgtctccttccagaaagtacgagaccctcccagaagggggctacagcggtcagcactgcgcccgccaaacctaaagctcatctcaagatcttcccgtggctccgaccgactctgcaaatggagcttaatgggtagcagggggaaggaattgctctcagccgaaaaacattaagctttgtcaattatcccccaaacccgctgggtttataaatatccctttttatttttagggttttccctcccgctcgcccccatcccgaactctctccacgccccgcttcttcccccacgcacacggcggctgcaccgtcacagaaagcaggtgaacgcggggccacggggcgctcgggtagaaatgccacgtcgcaccaccaagtcacaccgtccctgcccgtccctctccggccatcccactaactattgtattggggccatgcagccgctggaataatcagcgaagccacaggtctccccatcttggcaagtggaggtgtgcgctgccctcagacatctgtgaaccgctgttcaacgccaaccccgaaggcagaaggggaaaccaagtcacctcccagaaagacgtttgatgagcagagatagatttgcctccagactggtaccaggtctggggaaacccaggcagagccccaggctctatgcgacccaaagaagaaaaaaatgggtgcacagtgatggctccaggtctccccacccagatgctaccacgaaatccctggcatccacgaagcttccccctgttccatggtggaaattgggggaaaatggacttgtgtctccaagcagggtccatggacactggacgatgcctgaaatcccctgggaggcagggaaaaaaggcgcactgaacgctcaaccggggtataaggagtgatttttttttctctgctggcagcaggcaggaacctggggtttgaatgtccccttctctgtcgccacctcacgcagacttcagaggctctcaaggtttcctggagagggggaaatcgtccccggagctgacctgccaaccagtagcaccctccagcgcctcagccgggccacgccaaaatgacctgtcacccatctcccgcggggagtggggagcgggccagtccaccgcctcttgggacggcatctctggacggccactgacagtaccagtctctgtcaccccctggggggttaggggcaatgtcatcggccagggtggcagaaatagaaaagtgcgtgagctcaccaggcagcctgggtctcctgcgacgttttgtttgcctgagcccaattagaacaactctcaggatgatggagtatggcgggcggtggcccccagggggctgggaggcctagcccccatgcagaagtgcaccgtcatgatgagggtgtcccccgggcctggggaacagggcaggaccctgcttcccggagggaaataatgaagactccgccagcctgccagccagaaagagatgccccacggaaggctttgtggagggcagcgggggggtaggggagggatgcccaggtggggactcagtcaggcccaagctggggggctgtgggatttgagggcgggaagcagccgcccccagccccagctgcctgccttccaccgccaaaatatcagctggcaaagaaagaagagcagagggacagaaggcaggcgcgattggcagggggaggggggcacaaaggaagggaccctgggagggggaggggacttatgcaaatggcagattcgaccaagtccctgggccattaataaacgctccagcagctgccgctggtatcgcaggagcagaggagcgggatggcttccttctcccgggcgaaaggcggcagaaagagggaagaagggcgccccagacaaagaggcgccgtcaccctctgcaccccaaggacagcagcgatagggggccacccagaggaggccagaatcccagcagccaaagtccgggtggtggcggacgggagcccggagcgtgtgggtccctgtccttgggaccctaggggtctcttcctgcctcctccggcttctaggtatcatccctgctgctcagccgggactccgacacctcggacacccgcttcactagccgcggctgccgggatgtgtttttagggtctcggccagaggcaggaggaccccatgctcagaagggggctcccctagattgtgacggggggggacaggggaatcccagctgagcccagaagggggaggcaaggcacccccaatgaggctctgggaggtttgttaatttgggggaatgaggtcccaggaggtggctggatttgaggaagggttgcagaggaaggggcgttcttggaagctgcatatttagggagacgagaagacgatttgagactggggaaagagggtcaaccgaagaaggaggtcccagatttggggcggggggtgtggctgaaaaaaagattcccagtttgtgggaaaggttccctgatttgaggattctggagagaaagcggccgaaggggagttccccaatttgggaagggggggaattggtgggaaatgtccaggatttgtagggggaggtccgaaggggaggatcttaattttaggagagattcccataaagagaggtgaacttggccgcaacctggccgaaccctcgcacccacggcgcgggcactctaacctggggggctcccctcagggcacgccccgcgccccctttaacccagtgccgacggccccgcccccggtatgacgtcacctcccctccccccgcagcccccgggggctcccggggcgtgcggaacccgcggggctggcggttccaggggcggcttccccactctcgggatccccacggggcccccagcgcggaggggagactggggtgctgggcgtgcgcgtctgcctgccagagcccctggggctgggggctgaggctcgcccctgggtggggaggctggaagggggcgccgaggccgcagaagggtggggcaatgcccgagtgccggaggggcgacctcccataaggcaacgacagggcccggagtgttccaggggagacggcgtagactagggggtctccaggggagggagacccggagagggaaggcggcgggcgcagcagccctggagccaccccgcctggagccacccgtcccggctcctctccgctccggggcgcccgcatgccccccatcccccggcacagcgccccctgcctccaggacccgcccggggacccgggccgggcgccgccggggccggcaccggctccgcacacacgcgcgcccccctccgcgcctctgccccgcccgcagcccggggtggtgcagccggcggcgctgggcagcttccaatgccgcgctctgggcgcttccagcccagccccctcccacgccgcggacgaagcccccccagcaccccctgccgagcgcccccagcgcggccccggccctgtccctcggggcattgtccgggcgcagctaccggggcgcagcggctgggcgtgcaactggctgcagccgagcatcctccgagcacaatggccgtgcaggcttccccggcacaaagccggcgcgctgcccactcggctgcctccgagaccccccttggagcgcctgcatttttttttcctctaatccatgattttatttttttttttggctttacctggaggctggctgggctgggctcccccggctctgccccgcttcacatcgtggctgttgcatgggatccgagcggagcccgagcgccagcggctcgcggcgtgcgcgcgccggccgggctgccgggcgggcggcgcgaggacactcactgcggctcgcgctcccctagctcccgctcgcgcgcccccccagccggtgacgtcatcccttccgccagcgccgccgccgccgccgccgggtcgggggcagggccggcccgtgcgcgtcactgcgcagccgcgcggccgccacgccccccggccaatgggacggcgcagcgcggtcacgtggctccggggtgtttaaagggccgcgggagcacgtggggcgcggggcttcgcgggacacgtgggcggctggggtggtggtggtggtggcggctgcggcggcggcgggaagggcccctggggctactgtccgtgcgggagccccagcgtcctgggtgcaaagggcatggcactttctgtgcgctgccctaaactgtgccacggctccccagtacccttggaataaaatcccgcctcctctctgcagctcgccgtttcacattagcgcccactaccctgtcccctcccccccaccatgtcaatgatccagaaaaaccagctgctccttctttgctttttcagagatggggtctgccacctgggcctcagtacagtggtatgatcatagctcactgcagcttcaaactcctgggctcaggtgatcctcccgcctcagcctcctgagtagttgggctcgggtgatcctcccgcctcagccagcttcttacagttcctctaacttgagcatccaagaacttccccttctcatctttccaatttctgctcaaataagcagcgcctgggagaagccctccctgacaacagctaccagccacgccccactccactctatcccattatcccggtttgttgttgttgttgttgtttgtttggttttgagtcggagtctcactctgtcgcccaggctggaatgcagtggcgtgatcgcggctcactgtaacctccgcctcctggattcaagctattctcctgtctcagcctccggagtagctggaattacaggcgtgctgtcaccacgcctggctaatttttgtatttttgttagagacagtgtttc[144 bp omitted]cagagatccctattgtaggttgaacacatgaatgaatggatgatggagcacttcttatagagtaagcactttacacaggtctcacctaattaccatcccctgcttccctggagtcaggacgagccacagttggaacccagctaaaacactgatttgctgtgtgaggcccggagcctcactttccccatctgtagaatggatttgcctctggatctcagctctcatctgtaaaatggggcaaggtagcccctgctcctaaggagggtgtgatgatgaattgctataatgtggcagcctggctgccattggtgcctgaagatggaataataagagaaaagaggccgggcccggtgactcatgcctgtaatcccagcactttgggaagccaaggtgggcagatcacttgtcaggagttcgagaccaggctggccgacatggcgaaaccccatctctactaaaaatacaaaaattagccgagcgtggtggcaggtgcctgtagtctcagctagttgggaggctgaggcaggagaaactcttgaacccgggaggcggaggttgcagtgaaccaatatcacaccactgcacactctagcctgggcgacagagtgagactctcaaaaataaggaaaaaaaacagagcggaagtaaataaaagggggatattgacaaaggtaagggggttggagggctcacagccaccaagcaagattgcacatcagtccttgtgttttgatcatgtcgaaagcatttatttcctcaaggcacatatttggagaaggcctggtgcccaacagaggaactcaactttagaattggttttttttttcctccaaaattgttgattcattcattccaggccacagatgcagataaacaaaaagcattaacccggggaacaaaacgataaggcggaagtcataaacaggagaaaagagaggagataatgaataatttaacaaggaacctaatttaagcttggagtttcccagcggccagtgcagcagccacgtttgcagagcctactttgtttttcttcctggtggggtgaccctgatctgaccgtttacaatctggcctcagttttctcatccaagcaatgggaacacgatcccatcttgaaggatcaaatggggtggtctgtgcacaaatgcttagcgtggtttctcacgcacagtgggtgctgaagccttggagaattggtggagacacagtaaaatgagatggctgatcgtggaggggctgatcatggcacgaaccccagcccagtgacctgtttgggaggtgacctcaaacaagtggccgcaacactgtaagcctagctgtccccatctagaaaagggggacaaccactagtacctctgagggattttgtgagcagtcaaagaaaacagattaaatacatcaaaaacagaattaaaatacattgtagcagctgggcgcggtggctcatgccagtaatcccagcactttgagaggccagggcgggtggatcacctgaggtcaggagttcgagaccagcctggccaacatggcaaaaccctgtctctgctaaaaatacaaaaattagccaggtgtgatggtgcatgcctgtagtcccagctactcatgaggctgaggcaggagaattgcttgaacctgggaggcagaggttgcagtgagctgagatcacaccactgc[144 bp omitted]taacatggtgaaaccccatctctactaaaaatacagaaattagctgggcgtggtggcgcgtgcctgtagtcccagttactcagaaggcaggagaatcgcttctacccgggaggcagatgttgtaagtgagctgagcgccactgcactccagcctggcaacagagtgagactttgtctcaaaaaaaaaaaaaaatacattccagcatgtgcttgggaaacccatctgttcaggccatgcatccggccccgctcccaggttgtttgaagtgctgtggacaacagaagtaaacaaaacagtctttaaaatccctggagttggccaggcactttggcccagcactttaggaggctgaggcgggaggatggcttgagcccaggtatttgggactagcctgggcaacatagggagaccccgtctttacaaaaagttttagaagttagctgggcatggtggtacacatctgtgatcccagctacctgggaggttgaggtaggaggatcgcttggatgtgagagtttgaggctgcagtgaactctaagcacgccactgcactccagcctgggcaacagagcaaaaattcctggagtcaacagtgctgggaggagataggaaatatcttatttagagtaaaagcttaagctcttcccacagctcaccaagctctgcataacctacccccttccccgccctctgtcaccctcgctcactctgctcccgccactcgggcctccttgctgtgcctccaacacaccaggtaaggtcctgccacagagcctttgcactgtctgttccctctgaccaggatgctgttcctcctgcttttctcaaggccaattgttcctccttgctcttcgagtctctgggagaccctcccagaccatctcactgaggtgaccacatgatcatctttacttcagtatcagattatttatcatgatttggaatgattttatattttggccggtttgtgtgtttcctgcgtgtctccctactctagctgtgcctcagtttgcctgtctgtaaa[131 bp omitted]cccatctctactaaaaatacaaaaaattagcgggcgaggtggcaggtgcctgtagtcccagctactcgggaggctgaggcaggagaatggcgtgaacccgggaggtggagcttgcagtgaactgagatcacaccactgcactcctgcctgggcgacagagcaagagtccgtctcaaaaaaataaaaaataaaaaataaataatattggtcccttagggctgtctggagggtgaaatgaatcacactatgtcaaccacctgccaccaggtgcagactcacaaaaggatttctggtaagtgtggtcactgtaggctgggcgcggtggcccacgtctgtcatcctagcactttgggaggccgaggtgggcagatcacctgaggccaggacttcgagaccagcctggccaacatggcgaaaccctgtgtctactaaaaatacaaaaaaattagccaggcgtggtggcgggtgcctataatcccagctacttgggaggctggggcagaagaatcgcttgaaactggtgggcagaggttgcagtaagccgagatcgcgccattgcactccagcctgggcaataagaaacaaagtccgtctaaagaaaaaaaaaaaaatgcggtcactgtaaatgagaaaactatggttgcctagccagaaacaaaagatgatcctacaagtcgatacaacaagaacagaaaattataaaattcttttttttttttttccaagacagggcctcactctgttacccaggctggagtgcaatggcacaatcacagctcactgcagtctcaacctcttggggctcaagtgatcctcccagctcagctacccaggtagctgggacgaaaggcacagaccactacacctggctaatttttaaattttttgtagagacaggctctccctgtgttacccagcctggtctcgaactcctgggcttaaatgaccctcccacctccccctcccaaagtgctgggattataggtgtgagccactgtgtgcagccaagccaagaacagaacattctagtctgatgctgttgcagcctctggacagctccaggaaattgacacgtgttacaaaggtgttaaagacgcaatagcaccaagctaagccttcctgcaggccaaggcttgaagagaacaaaggagagaatgttgtccccaggggcatgcctcaaccctccaagttccacactgtgaaaaacactcagactgggaggtaggacatggtgggttctgggtctctttcctgtctgctgatcgtggtgagctggcacgcacactgagggtgtgagtcattgttgggtgaaaagttcagtcaatgaacattcgctgcttcttcaggagcgttgtgggggagggggctcttcccactctcccaccctcctcttccttttctgccagaccaacctctgcctaggagcctcccagaacctggtaattagctccattgtggttttgttgagataactccaggggaaccatcagccgcccatcactgtgtacaaacaggacccttcataccaagttcaggattgtctgcaaagaactcagccttaaattcctgccagacaggtccaaaacatctcccctaaactttccctgtgccagagattccactatcgttgcacgttacttcaaattaaatgttgttctctctgctcctctctctgtctctttctcctcacaaattcgcttcaaacgccaaagggaagaggagcagataggaacatcctatttgctgcacacctgctctgtgctgggctccatgtggggttcacttgggggtcccctgatttagctgatttggtaagcgttggaggatttggggaggcatgggttaggaaaacactcaacaactaggcacagaatgaagctttctcaacctagtaaaaggcatctacagtcagtatcatactttatggtgaaagactggatgttttccccgtaagattaggaacaagatgagaatgctccctcccaccacttctattcaacattgtactgaagcctataaccaggcaactaggtgagaaaataacataaaaggcattcatattggaaaggaagaaattaaactatctctatttgcacatgacatcattttgcatgtagaaaatcctaagggatccactaaagacctataaaactagtaaatgaattcatcaaggcggcaagatatgaaatcaatacacaaaaatccattgtatttcctatgcagtggcaatgaacaaacgaaatgaaattaagaaaccaattccatttacaattgatgaaaaagaataaaatacttaggaatatatttccaaaagaagtgcaaagcttatactataaaaaataacaaaaggttgaaagattaaattaaagaagacttaactaaatggaaagacatcccatgctcatggattggaagaataatattgttaagatgtctatactccccaaattgatctaaagattaaacccaatccctatcaaaatttcagttagcttctttgcagaaattggcaagctgatcctaaaattcatgtgaaaatgttcgaggaacttagaacagccaaaacaatcttgaaaaagaacaaagttggaggactcagacttcccaatttcaaaacttattacaacctactgtaaccaggacaatgatgtactggcataagaatagacattcagatcaatggggtagaattgaaagtgcagaaaaaaccctcatatctatggtcaattgatttccatcaagttgtcaattcagtggggaaagaatagtcttttcaacaagtggggccaggacaattccatattcacatgctaaagaatgaagttgaatccccacctcacaccatatacaaaaatcaactcaacatggatgatagacctaaatggaagagcttaaactataaaactcttaggaaaaaatgcagaggaataaatcttaatgatcttgaattaggcaatggattcttttgaggttcctttccaggtgattaaaatattctaaaattaaaatgttaaaaatgttctaaaataaaataaaaatgtttaaaaatgttctaaaatgtggatgattggtgatgatgatgtcccttatacaaaggggaaatttggacacagagacagacccatatagaggggagatgatgtgaagaagagacacagggagaaggcggccgtctgcaagccaaggagcgagacctcggaagtaacacatcctggctgggtgtggtggctcatgcctgtaatcccagccctttgggagaccgaggcgggtggatcacctgaggtaaggagtttgaaaccagcttggccaacatggagaaaccccatctctactaaaaaaaaatacaaaaaattagccaggtgtgggtagtggcaggcacctgtaatcccagctactcaggaggctgaggcaggagaatcgcttgatcctgggaggcggaggtcgcagtgagcggagatcatgttattgcactccagcctgggcagcaacagtgaaactccatctccaaaaaaaaattgtttttgccatgttggccaggctggtcttgaacttctgacctcaggtgatccacccacctgggcctctcaaagtgctgggattataggcatgagccaccacgcctgcccaggattggttacttctgagacctcactccttggcttgcagatgggccgccttctccttgtatctcttcttcacatcatttcccctatatgtgggtctgtctctgtgtccagatttcccctttttataaggacacccatcataaggtggatcatagggtggatcgggacccaccctaatgccctcattttaactttacttctgtgaagaccctatttccaaataaggtcacattctgaggtcctaggggttaggacttcaacatctcttttgggggaacgcagttcaaccccataaaagaccctttccctgacagtggcttcactgatacccctcaaggactttacctactcctggacaaggagcttgacatccccatgacatatgacaagagatgctagaccctagcccataaatcatgagcaccctttgttgattgcaataagatccaggttttgggagaggcaaggggatgccatgcagccagcctcccagctctagggcctggctggcacatgtaaagatcaagggctttattctcccactctccctgggggacgcaatgacaaattcagatcaggcctccgttgtctcctgccagctggcggtgcagacagggcctcttggttcatcccttctcaaggagaaaggcttggattctccaccaggtggggtctgtgctgggtattgtgtgtagagtcagagggacatgcctggcagtgtcatctggacccctgccacaagcctcaccaagccaagggccttccagtgccatcagtgtgggccctgagtgtggtacttgaaactttgagaggctacaacttatttattattgttttttaagacagtctcactctgtcactcaggctggagtgtagttgcatgatcatagctcactgcagcctcaaactcctatactcaaacaatcctcccacctcagtctccaagtagctgggattacaggtgtgcaccagcccacccgtctcatttctgcttttttttttttttttttttttgagatggagtctcgttctgtcaacaggctggagtgcagtggcacgatctcggctcactgcaacctctgcctcccgagttcaagtgattctcctgccttggcctcccaagtagctgggactacaggtgcatgccaccacgcccagctaatttttgtatttttagtagagacgaggtttcaccctgttggccagaacggtgtcaatctcttgacctaatgatccgctcacttcgggctcccaaaatgcatttttgtatttttttgtagcaatgggggtttcaccatgttgcccagattggtctggaactcctgggctcaagcgatcctgacacctcagcctcctgagtcgctgggactatagacatgtgccactatgcccagataatttaaaaaaaaattttttttttttgtaaacatggggtctcattgtgttgcccaggctggtcttgaactcctggtctcaagtggtcctccctcctcagcctcctggagccctgggattatggatgtgagccaccacactggcctcacaaagtgattttaagttctacgcactgagcatgaaacactatggtatggtcgcctgccaaaattactcacgtctaagaacagatgattccccttgagcttgttaatgtccctaggatttgttaatatcatggttgggtctttattgtttttctttgtaacttttttgtcttccttattcatttgacttgttacattgttacttgcgctcgtgttttaattccactgatacttgcatccagcgctggacacatgacctgaagtttctttaaactgggcgcggtggctcacgcctgtaatcccagcaatttgggaggccaaggtgggtggattgcctgaactcaggagttcaagaccagcctggctaacatggtgaaatcccatctctactaaaaatacaaaaattagccgggtgtggtggcacatgcctgtaatcccagctaattgggaggctgaggcaggagaatcacatgaacctgggaggtggaggttgcagtgagctgagatcatgccactgcactccagccttcgacacttcgacagaggagactccatcttaaaaaaaaaaaaaagagagagagagagagaaaagaagaagaaaaagagacatttaggccaggtgtggtggctcatacctataatcccagcactttgggaggccgaggcaggcagatcacctgaggtcaggagtttgagaccagcctggccaacacagtgaaacctcatctctactaaaaatacaaaaattagccgggcgtggcaatgcccacctttaatcccagctactccggaagctgaggcaggagaatcgcttgagcccaggaggcggagattgcagtgagctgagattgcaccactgcactccagcctgggcgaaagagtgagaccctgtctcaataaataaataaaaaataaaatgagacatttagttactgtgttagtccattctcacattgctataaggaaataccgaaggctgggtaatttataaataaaagagctttaattgactcacagttccacacggctgggaaggcctcaggaaacttacaatcacggtggaaggcacctcttcatagggtggcagaagagagactgagagagggagaaacttgccaaacatttataaaaccatcagatctcgtgagaactcactcactatcaggagaacagcgtggggaaaccatccccgtgatccaatcacttcccaccaggtgcctcccagacaaattgggattgtggggattacaattcaagatgaggtcaggtaatggctcacacctgtcatcccagcactttgggaggctaaggcagatggatcacctgaggtcaggagttcaagaccagcctggccaatatggtgaaaccctgtctctaccaaaacaaacaaacaaaaattagctgggcatgctggcgtgcacctgtggtcccagctactggagaggctgaggtgggagaattgcttgaatccaggaggtagaggttgcagtgagccgtgatcatgccactgaactccagcctgagcgatgaagtgagaccctgtatcaacacacacacacacacacacacacacatacacacacatatacacaattcaagatgagatttgagtggggatatggccaaaccatattagttacctaaaagcaaacaagtggatgtaaataaaatattaagtaactgatggtatgcacagcacaggaggaagttttttgaggaggactaaagtgaggacaggttgaatcacctccttgaaatgtgctgacacccaggcagcatgggctttcatagacccattttacagtggaagaaactgaggcttggggtggtggagtcactggcccagggacatgtttggaacacaggtcagccctactacagaagctgtgctctttccttccctggcggtcctgcctctggatgttttctcgaactgttccaaccagctggcttttcctctgcccatctctgccactttttgcccctgccacctccaggaagccctcctgactcttccagcccattgcccctgggtctttcatcactatgacagctgggctggggtctggcacaggaaggggcttatctacctgtcccacagaagagagcacaccatggagctggccggatacctgttgagtttgtgagaccttgcattggtgtgaaaagggttaactcacttcatttgcatactgtgcccagattcgtcttgggaatacactgcagcataattgaagagaggaaggggagttgcagataccctggaggggtggatgaaggggaaagggcttattctgagcaaaacgagaggatcctgagctgggggaggggaaaggatgtagggcacagatcaccctaactgttgtggggccactgagaatgatattcttcttcccagggcacaccaacttcttttttcctgcatgttttccatatttttccctcagactataataaggttaatcttggtttacatagttcggacacatagcacatccttctgaaagttgagcaaacagcaatcttaatgggcaattcaacccactccgtgttaaccactatgcagaccagcgtgtaagtcaatcaataaatatccatgagcggcttctagttgagtttaatcacatgcagttcttagagtagcacacggcacatagcaggcacttaatagatgtcaccatttttttggtttgtttttaagacggagtctcgctatttcacccaggctggagtgcagtggcgcgatcttggctccctgcaacctccgcctcccgggttcaagcgactgtcctgcctcagcctcccaagtagttgggactacagggccgcaccaccatgcctggctaatttttgtatttttagtagagatgaggttttgccatgttggccaggctggtctcgaagtcctgacctcaggtgatctgccggccttggcctcctaaagtgttgggattacaagcgtgagccaccgtgcccggccgatattgttatttcacaccttcagaggagacagcaggcgtggatgtgaacttaaccctcccgctgccacccttgctggctcccacccaccctggcccacagggaatggcttggaccaggaggctgagaccatgagacggcgagtgggatcgtcctggcagcggagatgttgctcaggataaaacgggaagggctaaataaatctgcttgagatgtgtcccaattacccgctcaaactcctctgcctgtgcctggcactctggggccctggagaggggagtttttctgatgccctagaggctcggggctgctgcagcatttcagatgcagcacaccagtcccccagcctgtggtccctgtccttgtcccccaatattgtcataactttttttggggagcggaggaacagaaagaaacccaaatattgggatgtttctgagctgggaaggccccgacatagaacaacagaaccttccattggatgaccacttgttatgtgctgtgggccaagaccttcccaggcagctgggcagcaaaaatccacgctatgagatcagactgattatttttgttccctttttgcagctgagcaaactgaggctcagagaggaaagggtggtactgaccctccaatagcttgggagaggcagggctgggcttccggccttaggtctgactccggctcattccttaattcatgaatgcagccaacggatatttattgagcaactcccaagtgccaggtactgttctaggcaccaggaaaaagcagggaacaaaacaggccaatatctccagccctcacgtgctgacttttttaatgggggagatgaaccagatttaaaaaaaaaaaaatgtaccacgggtcagatgggacataccagggaggaacatggaacaggaaacaggaagggttgggggtgtcattatacataggtggtcacagaaggcctcactgtgatgggttttttgtttattattattattatttcgagacagcatctcactctgtcacccaggctggagtgcagtggcacaatctcagctcactacaaccttcacctcccgggttcaagcaattctcctgcct[134 bp omitted]tgcctcccaaagtgctgggattacaggcatgagccactgcacccggcccatcactgtgatgtttgaacagaggccaggatgaagtgggagaagagctttccaggcagatggcacagcccatgcaaaggccctggggcaggaccgtgcctggcgtgttggaggatcagcaaggaggcccatgtagctggagcagagtgaggagtgggaaagagggagtagaaaaggcaggaacagggcagggtgtgcagggccttcttggccacaggaagacttgggcttttcccctgagggaggcgggagccatggagggtcataggcagaggaggggcaggacctgattcagatgctcacaggtgccctctggctgctgttgcggggaggacagactgtgaggaggcagggtgggactcaagggaccagggtggagatgactacactggcccaggtgggcaatgctggggctggatccagggagaggctgagggagtgggagaagtagccagtctggggacagacagagacagagtgaccctcagccaagcttctgacccgcttgcaggctttctggggcctggacaacctgcaggcaccaatgagggccacatgctcatcattaacccagatgatgggggttcagggggctgctgcctgatcaggatttgacccacgggtgtgcaccaatcagagttagtacacagaactcccaagtctcctggcctctccagctgctacccccaggccctgtgcagcaaggtcgaggaggacacacccccacccccagaccgggccgcctgtgcccccagtgactctgtgtattggctcctgttctacccttttgcatagctgtgcattcccctgagcactttagcaggagcccccagagggcggagcaggaggcaccggtgacatcattctcagggccagccactcccagtgtgcaccagacctgatcaagatccaaagacgaccagagttcccagatgacactggggctgcaggcggtgcctgaaatagcatttcacaagtgcagcctctgttccaggcactgttcctggggctttgcaatgacccctgccctcgcagtcctaggtctgtgctgttactgccatattttatgggcgagacgcagaaagcctgagcaccagcccatgcctgcacaacacagccaggactggaaactgtctctgggcaaaggctgtccctaggtctctggtgggagcccgctctgccctcaaatcaagggaaaggtgaggggcctgagaggtcagtaatcagtggatttctcagagcagagatcccttcccaatacgaactagacttgcatacttccagggatgggaccctcactccctgtacaggagaggtgccttggttttggacaatgctgagagttagacaatgtttcctttcagccacttgggctccctctccttcttttaatctccctcctttgactctgctcctcctcttcggaaactgcgcagaaaaaaaatcgccctctcccctcctttcctctcttctccatccttcctctttctttcctctccctccacatctttctctacttcctcccccccatctccctttctccttcctgtccctttttcctctctcttctcctctccattctcccaccccttcctcccctcctctcctctcctcttcctccatgaaatattttcagctgttcctctgagtatcagaacttgatagaaaagatgattccccgaatttggagtcagacacttcactgcctcaaaactgtgtcgccctgggcaagtcatatcatctctttgagcctccatttcctcatctgttaaaaaaaaaaaaaaaagtgatattccctgttttggtttcccctgtagcctcagtgactagctcagggcctgggacacagtagttgctcaataagtgtttgccaaatgaatgaatgttggcaccctttctttttcctttcacttctgggcccattgattattccttgtgtgccccaaatccaaccctgctcaagagagggcttggctggaccttgtgaccagtgtggaactgaaaaattagacaaagtctgcctcctggctttcttcctcgttgaacaatttgcatttaaatcatgaactgtaatagttagttatgtcattagctgcttaacatgtcttcccacgcattctgtgtgccaagagggcagggcggggagttttattcacattgttcatgcttgtagttccagcacctcggacagcacctgtcacacattaggtgctcaataaatgcctgtgtggtggctgaggggtggggtgggaggatgaacatagcatgctataaccttttctgcttcctttttccttatgctccaatctatgaagttttctgaatcaaacacactcctcttagtgaggttccaggcagagaacgtggcatgatcacctccctttttttgcgctccatactcctgttaatgcaatcagcacttttctccctttttctgcttttcttcttcaggagaggaaaatgttaaaaatgtgatgatgcagtcggaagtgttttaagccttcagacaattcagacttgagaatcaagtgatggaggaagagctaaaaaaaaaatacattctcgtttattaggaggagaaagaaagtgccatctcaaaaagatcgaggctcgttaatgctggaatataaagatagacacttcctgtcctcgacaggcaaacttcacccacagctgtgggcgccaggccctcaagagtggctggggcaggacggctacaaagagaatttgattgctccggagttgaagcccaacgtgttcgaggagtcatgccaagattcagtgaaggtcacacaggatgcgagctgctgtggggaggggttgtccttgggactctcctaggacacgggaaggctccacctccatgagaagaggattcatcttcctagtctgttacatgcaaaggtctcgtctgagccaagtcttgcacagatgtcccttttcccggggaaggaagtttctagcaaacacccaggtactgactgcatgaccttgggcacatgtcaccctctcgctgggcctcagtttccccatctgccaaatgtagagaatattttaatacttaacacgctaatagtagctatgatgggttgctgttattattagctgttcttactcttcttattgttgcttccataatacccctgccagggtgtttgtccagccagcgaggattttcttgaccctctgtccctttgacacatcactagctacctcactcactgtgtgaccccaccctctggtctcaacagattggacctgggtggctatcaccacccaggttatacaaacaggctgagccaatatgattctttctttcttttccttccttttttttttttctttctttctttctttccttctttcttcttctttctttctctctcttctctttctctccttccttcctttcttccttcctccctccctcccttccttccttctgtctttgttttttgctttttgttgttgttgttgtttgtttgtttttgagacggaatttcgctcttctcatccaggctggagtgcaatggcacaatctcggctcattgcaatctctgcctcctgggttcaagcgattctcctgcctcagcctccccagtagctgggatttcaggcatctgccaccacgccaggtaaattttttgtatttttagtagagatggggtttcaccatgttggccaggctggtctgaactcctgacctcgggtgatgcacctgcctcagcctcccaaagtgctgggattacaggcatgagcaaccacacccggccccagaggaattttttaacagggaagggattccatgtctggctttaaaaggtcgatctagcacatgaaggagcaacgtttcctgaaaagtgaaaagtcagcctatatttatccaatgaccccgatggcacaaccagctcattgatgagaaatatttaatagctgtttggggctgcgttgagaaggattctgagcctgtggctcagttctgcagggaaaggagtgctgcaatttattagtgatgcctgggccttgactccctgggaaagagttctgttattgattagtgatgcctgccatggaccattgcatggaccctggtgttctgtttgttatacatttgccttccccgggttaagtagctgctgcttctcagagaaaatcctccacaccctcctacagaggacagtaggatggctccagactcagacagtcaggggttccagtcttggctggactgctttctcgctgtgtgactttagacatgtggcttctcatctctgtgcttcatgttttctcctctgcaaagcgggaacagaaatctcacccacacagagttcttttgcaaatagttttaagtatccggcatgccgtagggttctgctgaggttgatattggcctctccagggccccctcactgcagcccaaggtctgaaggtaaatcagttttatttccagctccagctccaaggtgggttccaactctgcccttgagacctggcagacaccctcagctgcatcttgcacctggggtttgttcccagtgctgccacagacatgctcccacttggtggtggcgtgcatgaaacaagatggacgcagggaccgtttggcttggaactctcctggggaggaggtccccacacctggcgtccactcacctcccggcaagggtgattcttgccagcctgagtggggactgttccgtgcctggctgcttccagcacttggcctgatgtcccgccatcaacatttatgtctgcaggtggctgggaccactctgccttctctgtgaattggcatggactggagggactttggggagctgagggagaagtggacggctcagcagcatcttgctggtgcctgaccgagagatgactttggagacttttct[223 bp omitted]gaggcaggagaattacttgaacccaggaggtggaggttgcagtgagtcaagatcgcgccactgcactccagcctcggcggcagagcaagactgtctcagaaaaaaaaaaaaaagtacagagtgaggcagggttcactcagcctcaggaccaggggggagatgtactcctcccagacaccccggccccttcctggccccctgactttactcccacaccccactcggactttgtaccctccactcagcagccagaagaagatttaaaaacacgaacgtggctggacgcggtggctcacgcctgtaatcccagcactctgggaggccg[135 bp omitted]ggagcaggagaatcgcttgaacccaggaggtggaggttgcggtaagccgagattgcgcgactgcaacccagcctgggtgacagagtgagattctgtctcaaaaacaaacaaacaaacaaacaacaacaacaacaacaaaactggaatcaggtcaggccaccccttctccagacccttccacgggcctcctccagtgctctccccataaagttcatattcctccccagaccccctgcccatctctgagcctcagtttgttcacctgtcaaatgggtctatgagccatcagactgtgagcccacaattggccatcttgttccttgctgtatccccagcacctagaacagcaccagacacacagcaggtgcctaataaatgaatggaggaataagcaagcaaaccaatcagcaaattcattcacacttacaggctcagctctgtccttctgtggcctcagtgactcctgcctggtccacctctggctgcctctctgagctccgtctttctgggattgatgagttgggtctaagcagaggcccagggtacagatgtcactgtggcctctgtgtcccccacctgtgtccccgcagctcccgggctgcagcctgtgagggaagacagatgggctcataatgtccaatgaatcatagccactgcatcccagcctggacacatgcccagcccactcatccgcgggtctgtgacatgtaagagttggcgctactcttcccctgtgtgtgccagaccctgtgtggccacctgggttggtgtcatccaggggaaataacaggctttgttctccccgccccatctgaccggttttctcctctctgccacaaaagtcaacattctggacaagggtgggaggaagtagtgcttccacatttcgcaggaggactaacattaattaagcacttaatatgtaatgggcaccatttggagccctttattacaatttccacatttaatcctccaacaatcctattaccagccccattttacagatggggaaactgaggcacaagtgacttgcccaaggcgcagagccaccaagagtgcttatggcagtattgtctccaatagcaaaaatggaagcaacctagatgtccacccatggggaatgattaaaatactctgtttttttgttttgttttgttttgttttgttttttgagatggagtctagctctgtcccccaggctggagcgcagtggtgcgatctcggctcactgcaagctccacctcccgggttctcgccattctcctgcctcagcctcccaagtagctggaactacaggcccccaccaccacgcccggctaatttttgtgtttttgtagagacggggtttcaccg[137 bp omitted]gcacacacctgtagtcctggtgactcgagaggctgaggcatgaggatcacttgagcccaggagttggagggtacagtgagctatggtcacaccactgcactccagcctgggcaacagagccagatcctgtctctaaacaagaaaacaacaacaacaaaaaaattagaccaggtgtggtggctcacacctgttatcctaccactttgggaagctgaggtgggggggttgtttgaggccaggaatttgagaccagcctgggcaacatagcaagaccccatctttaaaacaaattaaaagaaaattagccaagcactgtggcacacacctgtggtcccagctactcgggaggctgaggcggggggatcacttgagcctggcgagtggaggttgtagtgagcagagagtgacaaagaaagaccctgtctcaaagcaaaaagacagagagaggaagaaaaaatttaaaacccagtctggttccatagaataccaaaaagaattgcaaacaagtgttcaaacaaaaactagtacacacatattcataacagcttgattcgcaattttcagaagctggaaacaacctaacagtccgtcaacggatggatgaataagcaaaagcggtccatgcatgccgtggaatatattcagccataaaaaggaatgaagttctggccgggtgtggtggctcacgcctataatcccagcactttgggaggccgaggcaggcagatgacttgaggtcaggagtttgagaccagcctggccaacatggcgaaaccctgtctctactaaaaatactaaaattagccaggcacggtggtgcatgcctgtaatcccagctacttgggaggctgaggcaggagaatcgcttgaacccgggaggcagagg[133 bp omitted]gctcagtgagaggagccagacacaaaagaacagagactatatgattccagttattgaaaatgtctagaataggcaaattaatcaagacagacagcagtgtagaggctcaggagaggaaagcgggaaggtattgcttcatgggtacagagtttggattgataaaaatgttttggaagtagatggtggtgatattgaacaatattgtgaatgcactttaatgccattgaacatttttatttttattttattttattttattttattttattttatttatttatttattactttttgggatagagtctcactctgctgcccaggctggagggcagtggcgtgatctcagctcactgcaacctctgtctcccggattcaagcgattctcctgcttcagcctcctgagtagctgggattacaggtgctcaccaccacgcctggctaatttttttgtatttttggtggaggcggggcttcaccatgttggccaccatacccggccccactgaatatttttaaatgaataaagtaataaagtttctattatgtgtgtaatttaccaccataaaaaattaatagtctgggccagacgcggtggctcaagcctgtaatcccagcactttgggaagccgaggcgggcggatcacctgaggtcaggagttcgagagcagcccagccaacatggtgaaatcctgtctctactaataatacaaaagttagccagacatggtggtgggcgcctgtaatcccagctactcgggaggctgaggcaggagaatcacttgaatccgggaggcagaggttgcagtgagcagagatcgcacaattggactccagcctgggcaacaagagctaaactgtctcaaaaaataagaaataaataaataatagtctgctttattccctcagtggaatactatgcagctgtataagaattgggagtcattttgttgtgttttgagagaggatctcactctgtcgcccaggctggaatgcagtggcacaatcgtggctccctgcagccttgacttcctgggctcaagcgctcctctcacctccacctcctgagtagctgggactacaggtgcaccaccatgcctggctaattttttatttttatttttagtagagatgggggggtctcgctatgttgtccagagtggcctcgaacccctggcctcaagtgatcctccagcctcggcctcccaacgttctgggatgacaggtgtgagccagtgtgctcagcagaagtgagaatcttcgtgtactgaaaagaaatgatctcgaaggtgtcttgttaagtcaggaaggtgcagaacagcttgtgggtacacatgcgtgtgtgtgaaaaaagcaagtaggcaagaaaaatatacacacaagtgcttgtgtgtacataccctgtccctggaagggagacaggggacatgggataacaacggctacctctggggatggttactgggtgatcagggccaggacagggaggggaattttgccccccataccttgaaaggcaaaaaaaaatgatagtaaaatccagctctgggccagtcgtggtggcccacgcctgtaatcccagtactttgggaggccaaggtgggaggatcccctgaggtcaggagttcactaccagcctggccaacatgataaaaccctatctcgaccaaaaatataaacaaattagctgggtgtggtggcgcatgcctgtgatcccagctacttgggaggctgaggcaggagaatcgcttgaacctgggaggcagaggttgcagtgagccgagatcgcaccaatgcactccagcctgggtgacagagtgagactctgtctcaaaataaataaataaataaataaaattaaaaagccagctctgccttgaacaagctgtgtgacctcaggcaggtcacttcacctctctgtgccttagtgtccttatctacaaagcaagcatgatgaataccagctcagaaggatgaggatgaggctgtactgcattaatactaatagggtgctggaagtagggtttggcataacacaggtgccatctaagcatttctcttgagttgggtactcttttctgcctttatctatccaaacaaagaaatgtctaaaactcaagtttttgaatgcggaacgaagggtgtatggagagtgtttagctcctggtgcccagcccatgtttggcatctgcagcctctgggctggtgagctcaccccttctcttctccactccttccccggaccatccccagtaacccagcctcagagcaagtgatgcaacctggggaaaccgagtccctctggccacgggtgctcccaccacaccttgcctgcatggaagatggagggcctcctagcattttgttctcaggggatgtggaacgaggatgggaagtgcctcccagtcaccttaattagcatctcagaggagctggttgccatgacatcgggaggaagttgctggccggggcggagcctggcccaggttgccccaggagggaccccatttctctccacccaccagtggctggcctggccaagtccctcagctctggactcaggctaagttgggtttccatccaagctttacttctcaccatctgagacttttcctcttctgggaagtagaaactaattttaaaaagtcttcctaggaatattgggagaatttaatgggatataaaatgcccagtgctgggttcggagacttaactattgttattatttcctttggagaaagtggttttaaatatgacccccaaacttttcttctttctctttctctctctttctttctttcttttttttttttttgagacggagtctcgctctttcgcccaggccggagtgcagtggcgctatctcggctcactgcaagctccgcctcccgggttcactccattctcctgcctcagcctcccaagtagctggaactacaggcgcccgccac[187 bp omitted]ttctctttctttctttctttctctctctttctttcttttctttctttctcgctctctctttcttctttctttatttcttcttttttttcttgctccatcatgcaagctggtgtgcagtggtgcgatctctgctcactgcaacctccgcctcctgggttcaagtgattctcctgcctcagcctcctgagtaactgggattacaggagggcactaccacgcccggctaattttttttgtattttttttagtagagtcggggtttca[131 bp omitted]tcccaagaacacacttcacaacgttagtagtggttacgtctaggggctggcgatattaataataactgacacatttcatccccccaatgactctgagatgggagtggttgtgcccattgtatagatagggaaactgaggctcagagaggggatgcagcctgtcgacagtaactgggatttgaagccaggtggccaactccctgacactccagaccaccacaggactgtgaattactcctttcttttcttttctttttcttttttgttaatagagatggggtttcactatactgcccaggctggggtgtagtggtgcaatcatagctcactgcagacgcaaactcctgggttcaagcgatcttctctcctcagcctcctgagtagctgagactataggtgcacagaaccatgcctggagaatttttaaagtttttgtagatatgaggtctcactacattgctcaggctggtctcaaactcctggctgcaagggatcctctcgcctcggcatctcaacaaactgatattacaggcatgagccactatgactggtctgaatgactcatttctaagttcattggttggtgggggggtgggtctggtccacaaacacttcccaacctgaggataaggaggccaccctctaagcagtatctgggggccagcctatgaagcaagcacgtctatataacctcccctctccacccctcctctcaagggaggaagctgggggtgctgaggcccagagagaggctctgccttaggttatgcagcaaacctctgcagtggtctctacctctccatctatctatctctgtccaggtctccagggagggtatgagaagtagaaataagatgtagtgatttaaaaaaaataaaagcaagattgatgctgctgctaaaggatcttctgattcaggagacatcagagagcagcattttgggtgcaagtggaggttgggtcctccaaccttgctccagggccagataagccccccccggagggacttttttcagctggtgtgaatgttgtgggccctgagacttggaccccataagagtccctcagagaaaggctgtgtgggcaggagctctgccccattcaagtacaaccacagcctgggagagcaagggacagcctgacaggctctggtccgttcaaccaactcaagttagtgatgatgctggcgaggccatgtgttggcagtagggggaaggaggctcaggaagaaaccaaggaggcaaactgggtagtaccttgaggatctcaagggaatggccagaggggcaggtggatgtggcagcacaaacctggagatagaacagagcatagggtgtagaatgtgtagacactgaagggatgggggggagaatggatgtgttagaattattggatgggtggatggatggagacataaatggttgggtggatgggttacagatgggtgatgagtgctgcctcctggcttcagctgctatgggtggatgatagatgatagacgggagaacggatgatggatggatggatgaatgattgatcaatgaatgggtaagtaggtagatacatggatcagccagtgggtggatgggttatagatggatgatagatcatgggtgagcaatggatggatgaatgagtaagtggatgagtgactggtggatggattatggatggataatagatcatggatgggtgatggatggatgacggatggatggataggtaggtggatgagtggttgggtgggtgggttatggatggatgatagatgatagatggatgaatggatggatgaatgagggatagatggttggatagatgggtaggtgggtgaatggttggatggatgggttatggaaggatgattggcgatgtatggatgaatgagtagataaatgaatgaatggatggatgggttacggatgagtatagatcatggatgagtgatagatgaatatatggatgaatggatggattgattcgtggttgggtggatgggttatggttggatgatagatggtggatagacggatggatgaatgaatgatggatcaatgaatgggtaggtaggtatacagatggatgaaagcatgggtgaatggatgaatggattgttggatagataaatgggtagcactactaactgtaatggcaacagcccagtgataccagttctgccttaccaagaagaatatgtactgagcacatgacttcactaaatcctcagactgactgagtgtggggttggctgtggccctgatgctttcactctacactcggggtatccga[186 bp omitted]ggtggcgggcgcctgtagtcccagctacctgggaggctgaggcaggagaatggcgtgaacctgggaggcagagcttgcagtgagccgagatcgtgccactgcactccagcctggacaacagagctagactccgtctcaaaaaaaaaaaaaaatctcagtggtgggctcttcccagtactattctaagatttcccttgtccaggtggcttcccagtgtccaaatccagtgatcacttctcagcacccatcctcctcatgctcctagcaacatctaccctgggtggtccctcctcctgggagcatcatcttcacgtggcccccagcgtccccacatttgcctgcattcaccctcctctctgttggactcttctcagtctctctgcaagcttctctctgcaagcttctctcttctgctcagctgctaaacacagggtagtccttgagcatagtctctgtctcctcttctcattcatccccatggacatgaatacattctaacaccatggactaacaccatggacacgaatacattctaacaccatggctagtaaaagctagctctgggccaggcgcggtggcccacgcctgtaatcccagtaccacggactgtcagatttatgccttcagaaggcatctcttctgggaacatcagaatcttatatccaaatggcccgtctgcatctacatgtaggtgcccaaaaggcagctcaaacttaacaggccaaagccaaaccttggtcatcacccctccccatcctgtggctcctaccccatcctctatcatccatccataatatatctacccaaccattcattcacccactcattcaaccatccattcatccactcatccatccctccatacacccatccatccctccatacacccatccatcatccatctattcatccacccatccccatccatccatttatccatccattatctattatccatccatgacccattaacccaaccactcacccacccacctacctatatattcatccatccatccatccatccatccgtcacccatttattcatctatccatccattcactcatccatccatcacttattatccataaccgatccacccaaccactcactcatccatccatccacccatccatccataatttattcattcattcatcatctatatccatctataacacatcaacccgctcacttatccatccatccataattcattcattcatcatctattatccatccgtaacacgtccacccacccactcttccatccatccatccatccatccatccatccatccttattcatccattttcatcctccccaaactcatactaataggttgcacctctaacatccaaggggctcaagtcagaaaccctggaatcaatctcaagtcaactcttttcctcacatttcaccatcagtcctttagaaaatcttgttggctctgccttcaaatctattcacaacctgcctacttctcgcccctcttttacatccccaggtccagccccatcattgcctgcctggaccagtacagttgcttctgccctggtcctcacctcccctgctcactaacccatcagaccgttcccccctcagcagccagagggcgcctgtgagcacctgagtcaggtcctgtccctcttctgcccacagccctccatggctgtcacctccctcagagtcaaaaagcaagtcctctctgcggcccacaaggctctgtgtgacctgccttgacacctcctcctccgtctctttcccttgctcactgtgctccagccacagggttttcctcaatgtttctccaacgcaccaggtggggtcctgcctcagggcttccgcgtgggctgtgccttctatctccctcccccacctccacctcctttggtctctattgaaatggcgcttctcacagagacctcccctggccacttccccacatttatctccgtcagagtctgttctcctttactgcttgtttccagcccaccccaccccccgcccctcacccttagctcttaccaccatctgaccccctgtat[139 bp omitted]cctcagcctccccagtagctgggactacaggcgcccaccaccacgcccggctaattgttcgcatttttagtagagacggggtttcaccgcgttggccaggttggtttcagtctccagaccccgtgatccacccgcctcagcctccccaagtgctgggattacaagtgtgagccacagtgcccggccacttgtgtatttttgtcttttagacagagtctcctcctgttgcccaggctgaagtgcagtggtgtcatcatagctcactgcagcctcatactcctgggctccagcgatcctccctcctcagcctcctaagtacctggaactataggcacaccaccatgccctgctaatttttttttcagagatgggatcttgctatgttgcccaggctggtctcaaactcctgggctcaagtgatgctcctgcatcagcctcccaaagcattgagatcacatgagtgagcagctgtgccccacctacttgtgtgggggggttttctttgttaacatgtaacatcagctcttcaaaacagagatcttcattctgtcaaatttgctatttcctctcagtacctagaacagtgtctgactcagttaataggtgttgaataattaaatatctaaagtaagccccaacccattcgttgagcacccactattgccagatgctgaaaagcttgtccagaaaaagagaaagtggctaaacccatgcagagaccacaccccaaaccagttcagaaaggcggatcacctccaaaatgtggcaacaagaaaggaagtctgccggttgcagtggctcatgcctgtaatccctgcgctttgggaggatgacacaggaggatcacttgagtccaggagtttgagaccagcctgaccaacatagcaagaccccatctctaaaaaaatttttaaaaattagctgggcatggtggtgcatacctgtaatcccagctgctcgggaggctgaggttggaggatcacttgggcccaggaggttgaggctggaatgagctatgatcataccactacactccagcctaggtgacagagttagactctgtttccaaaaaaaaaatcccaaaaaacaaaaaaaggaagtcctttccgtctgggctttccttgcctcctactctgagccactagtttcttcaggcatcctgaagcgtggacttgcctcccgtttgctgcacacgggcccccatccctggctctgctccttctctcacaccctcagttccctagtttgaggaagtttttcttccgagaacgttcacgcaagcctttcgcaccctgggccagcgacacgtgagcctagaaaaaagcttaaaggtcaatgtctataactgaattttcctctatataaaaatagcatctttgtaatcgtttaaatggctctgagggagggagagagggagcgagagagagaatgagggagaggacgagaggcaccgagggatgctgtgtctcccagccagcaggtgcatgtgcgagggcatttgtatggatacgcgtgtgtgtacatgtgtctatgtttgtgtgtgcatgcacctgtgcacatgagctcacgtttgtgtgaattgtgagtatgcatatgtgcatttcatgtgcatgtgcatgcatgttcaagttttgtgtgtgcatgtgtgcctgtgtgcatgtgtgcctgtcattgttcacgtgcatctatgtgcacacatgtctctctgtgtgtatgtctgcctacaggcatgagtatgtgagcgtgcatctgtgtgtgcaggcatgttcaatgcatgtgtgcacacatgtctctgtgtacacatgtgcctaagtgcgagtgtgtgtatgtatacacatatgagtccatgtgtccatgtttgggtgtgcatgtatatttatgtttgtgtgaattgtgtgtgtgcatgcgttcgtgaatatgcatgtgcgcacatgtgcttatgtgcatctgtgtgcatgtgtgggtttgcatgtatgtacatgtttatgtgcttgtgtgtctcttgtgtgtgcaggtctgcctacatgcatgagtgtgtgagtgtgtatctgtgtgtgcaggcatgttcaatgcattgtgcacacatgtctgtgagcacatgtgcctaagtgcaagcatatgcatgtatacacatgtgtgtccatgtgtccgtgcttgtgtgtgcatgtatgttcatgtttgtgtgaattgtgtgtgcatgcatttgtgaatatgcatatgtgtgcatgtgtgcacatgtgcttgtgtgcatgtgtgtgccagtttgcatgtatgtgcatgttcctgtgcacatgcgttcacatgtaatgatgtgcacatatgtctcatgcgtgcatgtgtgtgcatgtatgttcatatgaatgtgtgcactcatgagcatgtgccacatgtctctgtgtgcatgtgtgcatgtatgcctacctgcatgtaggcacccgtgtttgtgcatgagtgtgtgcacaggtttgttttgtacacactgtctgggacctgccttaagcttcaggtgtccattccccattccaccagagtggctgcctacacttggaaaatgaacaggatctggtctcaagccttcctgagctccaaccagccctgcctgagcgaccttgggtgtatcatctgtcctgctgagcctcacattttccccacgtaaactggcgtgtggggtgagcacagccacagagagctcctctggctgagtgccgagtctgtgaggaaccggagctgggggttcagctgcagttggagctcgacctggatgaatggatggcacatggaggatgctggtgagtgacccaaggaggggtgagtgaggtgggtgtgggcttcttctctgggcctcggtttcccctccttaccctggagagttggactcaagcctctcttgatccttctagtgaaaagatcccacacttggctgtatcggggttcctccttctgtcccgcattctcaaatccccccacctcattcttgagtgtggcctgggagtgaattggaaaggctctctctgggcctcagtttccccagccataatagagaaaagtcacttagatgggtccagaggaccatacccctctaacattcaggaatgtcctcatggaaatacatttcctccctactaactttcaacagaggaaagtttatcgtcatctgaccttgcctttttgtttctgtttttgtttttttgagacagggtgtcactctgttgcccaggctggagtgcagtgatgagatctgagcccattgcaacctctgcctcctgggttaagcgatcctcccacctttgcctcccaagcagctggattacaggcatgcaccactacactcatctaatatttgtatttttagtacagatgggatttcagcatgttggtcaggcaggtcttgaactcctgacctcaaagtgatccacccccctttgcctcccaaagtgctgggattacaggtgtgagccactgtgcctgactggagtgcttttctcccaagagatccacttgagtcctcccttctcctcttcaaatctttgctcaaatgtcacctcctcagagaagccctccctgactaccccagctaaagaaaccatgtctccaccactgtctacaccctcaccctacattatttttcttcatagccctttcaaaaccattcattatcttgtacctcgatgagtgaccatgcctcatcaactcgaaggcagccatttttgcctgtctttctgttgcaaattccaaagcctagaacagaacttggcacacagtaggtgctcaagaatacttgttgaatgaatgaatgaatgaacgaataatggaaggtaggaggctatgactgcccattcacagatatggacacagtggttcaggaaacgaacgtcactcagtccaagtcccacaatggtcagtggcaaaagtagggttcaagcccagctggctcgtccctcctgttcttcctcccactcatgccccaggtctgaggggctgcccagctgctgctagcaacctggcttcgacctccaaccattgatccaccagaggctgctctgtgggatgcacttcctgatttagctaaaacaccctgcgctggctacagcggggtgatcgatggccctacagtcagctcaggcacccccaacgcagacacatacatttgaggcctctctctagcccttgcccctgcaatcccaggctgaggtggtcctgctggcgggaagtggatggagcacatgtcgtgtggttctagatggcggtggccacatctcctgggcacctgtattctaccaagaggaaggggaaaagttactgcggtcaaggaaatggaaaatcaaaaccagaacaagatcttgcttcacattgatcagattgggtaaatgagggggaaaatggatgagattaactattgatgagggtgagggagatgggactcatggacagctagtgagccaaggaatggtgggcagcttcgcagcatcaaataaaactgcgttgcagcaactctacccagatctctaacccagagaagatctacatgcgtgtgcaaagacgcctgtttgctaatgtgctctacggagtcatggtggataaactatagaaggtgcatcttatggaaacatatgcagctgttaaaaagaaagagggcccttgcgtggaggctcatgccttgtaatcccagtgcttcaggaggctgaggtgagaggaagggttaaggccaggagtttgagaccagcctaggcaacatagtgagactccatctctgctggaaaaaaaaacaaaaaacaaaactttaaaaattagccaggcatggtggtgtgcacctgtagtcccagctacttgggaggctgatgcatgaggattgcttgagcctaggagttgaaagttacagtgagctatgattgcaccactgtactccagcctgagtgacagagtgggaccctgtctgaaaacagaagaacaagaggaagaggaagaaaaagaagaaagagaaggagaaggagagggagagggagagggagaaggagaggaagaggaagaagaaggagaaggagagggagagggaaaaggagaaggagaggaagaggaaggagaaggagaagaagaaggagagggaggaggaggagcagagaagaaggagaggaagaagaagaagaagaaggaggaggaggaggaggaggaagaagaagaaggctgatccatgtatcctgtcctggcaagggctttttagagacaagtaccagaggtcacctaggctggaatgcattggcgtgatcttggctcacgacagcctcaaactcctggactcaagtgatcctcccacctcagcctcataagtagctggaactaccagtgaacaccaccaggcctggctaatttttttttttttttttttttgacagagtcttgctctgtcgcccaggttggagtgcagtggtagtagctgggactacaggtgcgtgccaccatgcccggctaattttttgcatttttagtagaaatagggtt[143 bp omitted]gttgcccaggctgatctcgaactcctgggcccaagcaatcctcccacctcggcctcccaaaatgttgggatgtcaggcaagagtcactgcacctgggcagaatcaccagttctttgatgcccatgtctgcactcctactctctctgtcctcatttgttcatttattcactcaacaaccgttgtgtgcatggccccgttctagacactgaagactcagcagagatcaagagagacaatatttcctgtacttctggaactcatggaagctggagagagacagaatttgcaagtaagcaaaataaatcgatcatttcattgttgttgttgttgttgagatggaatctcactctgtcgcccaggctagagggcagtggcgcagtcttggttcactgcaacctccaccttccaggttcaagcgattctcctgcctcagcctcctgagtagctgggactacaggcgtgcacaactacgcccagctaatttttgtgtttttagtagagatggggtttcaccacattggccaggctggtcttgaactcctgatctcaagtgattcgcccaccttggcctcccaaagtactgggattacaggcatgagccactgcaccccgccaaaaatgatcatttcagacagtgataactgatgaacagaagtgaaactgggtgaggtggaaaaaagtgataggttggagggatgcagttttagctggggtggtccgggagggcctgtctgaggaggtgacatttgagatgagacctgaatgatcagaaggagccagctgtgagaacatgtggaggaagggtgttccaagtagagggaacagtctgtgcaaaggccctgaggcaggacagtgcctggggcattggaggaacagtgaagaggcctgtgtggctggagcagagtgaggaaggggagagagggagaaggggagggcagggaaggggcaggaggacaggtcatgcagggccttgtgggttgcaaaaaggacttggggccgggcacggtggttcacgcctgtaattctagtaccttgggaggccaaggtgggtggatctcttgagatcaggagttcaagatcagcctgaccaacatggtgaaactctgtctctactaaaaatacaaaaatgagccaggtgtggtggcaggcacctatagtcccagctactcctgaggctgaggcaggagaatcgcttgaacccaggaggcggaggttgcagtgagccgagactgtaccactgcactccagcctgggtgacagagcgagactccatgtcaaaaaaaaaaaaaaagggacttgggctttgaccctgaggaaggtgggaaccatggggggctgcgggcagaggagggacaggccctgactcaggtgctcacaggcaccctctggtggctgcaatggggaggacagactgcggcaggtaagggtaggagccggggaatcaggactgaggcaactgcacgagtccaggtgggcagtgatgggggctggacctggtggagaccacagaaggaggaagaggatgaggttatacacattccacctcacctccctccaccatgagtggctcacctgcagggcagtggcatgtccccagcaccaccagcaccacaagctcatgaatccccagagtcactgcagctgcaaaactcttagctaggagtgccctcagaggcccagagatgtccagtgtcacccgcaggtcgcccgatgaactggatgcagagccagaacttgtgcccttggtgccacctcccctctggctcagctgtgctctgccatctcttccagggacaaagattaggagtttgtttactgatactatttttattgatctttttttaaaacaagtgctcagcaaaaaagatgcacttagccaaactgctcctatgatatctgtgggaattcctctaagctgtcccaggcgtggggactattgggtggcaaaagcacagaacttgatctcttcagatttctttttaatttattattattattattattattattatttttgagacggagttttgctcttgttgcccaggctggagtgcggtggtgccatctcagctcactgcaacctccagctcctgggttcaagcgattctcctgcctcagcctcccgagtagctggggttacaggagcccatcaccactcccaggtaattttttgtatttttagtagt[139 bp omitted]agttccaggatatatgtgcaggtttgttacataggtaaatgtgtgccatggtggtttgctgcacctatcaacccatcatctaggtattaagccctgcatgcattaactatttatcctgatgctctccctcccccgattcccccaacaggcctcagggtgtgttgctcccctccctgtgtccatgtgttctcatttttcagcttccacttataagtgagaacatgcagtgtttggttttctgttccggtgttagtttgctgaggatgatggcttccagctccatctatgtccctgcaaaggacatgatctcgttcctttttatggctgcatagtattccatggtgtatgtgtaccacattttctttatccagtctatcattgatgggcatttgggttgattccatgtctttgctattgtgaatagtgctgcaaagaatgtacacatgcatgtatccttataatagaatgatttatattcctttgggtatatacccagtaataggattgcttggtcaaatagtatttccgattccagatccttgaggaattgccacactgtcttcctcaatggttgaacgaatttacattcctgccaacaatgtgaaagcgttcctatttctccacagcatcaccagcatctgttgtttcttgactttttaataatcactattctgactggcgtgagatggtatctcattgtgtgtgtgtttttttgtttgtttgttttagacggagtctcactctgtcaccagg[178 bp omitted]tatagggtgatcagctcatccaggtttgcccaggactttcctgtttttagcaccaaaattccctcatcctagagaactcagctgcaaaccgatggttggttatgttacgatcacaaggaaaccatgtgagatactgagtaggtgggatgggggttcctcagatagagttggtaacagtttgtccctcatccggttatgcaaagagtcatcgtgataatgcatgtcctggtatatagtaagcaattaataaatgctggcttttggaggttgaggctgcagtgagctatgattttgtcactgtgctccagcctgggtgacacagggagaccccatctcttaaaaagattttttttatttaaaaaaatggtggctcttgcaaggcaggtgagatgttgagggcttgtcataagggcacctatttgtcggagggagtgtttcaagccccttctaaaaagcaaaaagtaggctgggtgcagtggctcatgcctgtaatcccagtactttgggaggccaaggggcagaacatttgagcccaggagttcgactccagcctaagcaacatggtgaaaccctgtctctaccaaaaatacaaaaattagtcaggcatggtggcgcatgcctgtaatcccagctacttgggaggctgaggcaggaggattgcttggacccagaaggcggaggttgcagcgagccgagatcgcaccagtgggctgcagcctgggtgacagagcgagacccggtctaaaaaataaaaataaaaaataaaagcaaaaagtgaccttggacagtccagctcaggatagaggaatgacactcacgctaagacccagtgtgttttcctaatgtaatatgcaagtcctctctcgctctataacattccatagctcccactgccctctagagtaaatccacccctctcccttacagaccccaataacctgtgtgactttgtcctacaactcctgaattacccttagcacccacccatattcccacctccagacctttgaatgcagttttctctactgagatacccttccctgcttacctggaggactcatacagagcccaaaagcagccctttccctccagaagttgctcccaccaataaacaactattcctggagcacctacttcagggatcagcaaacaacggccctgtgggccaaatctgtccccctacttgtttttgtaaataaagttttattggcacacagccatgtccattcattaacctgttgtctatggctgctttcttgctaatatggcagagttgaatagttgggatggaaaccatatggcctgcaaaataaaaaatatttacagccaggtgcagtagctcacacctgtaatcccaacagtttgggaggttcgggtggggggattgcttgagcccgagttcaagaccaacctgggcaacataaaaagaccccatctctacaaataatagtaataataataataataaattagcccagcatgttggcatgcatctgtagtccagctaccctggaggctgacgtggggggatagcttcagcctgagaggttgagatgacagtgagtcatgatcactccactccaccccagcctgggcgacagtgagatcctgtctcaaaaaaaaattttttttaaacaatctggcccttttcagaaaaaatttactgacctctgacctactaggtacctggccctgtgctcaggacatccaggacacaatggtgaaggagacagacacagctctgtattcacaggactcatggtttagtggggaagacagatgaaaaataaaattcatagctagcccacgaaatcagatgaacgtgaagtatggctactttattttatttatttatttatttatttatttatttatttattttttgagacagactattgctcttgttgcctaggctggagtacaatggcacgatctcagctcactgcaacctctgcctcctgggttcaagcaattcttctgcctcagcctccaagtagctgggattacaggcacccgccaccactcccggccaatttttttttgtattttaatagagacggggtttcaccatgctggccaggctggtctcgaactcctgacctcaggtgatccacctgcctcagcctcccaaagtgatgggattacaggcatgagccaccgcacccagccagccactttattttctataatttaacttaatttcagattccgagaccttcatccttccagtatctgtttctctcaggagttcactaactgagacagagagtagaacattggtgactggagactgggggagggggcggagagtgtttcatggggacagagtttcagtttgggaatatgagaaagtttaggagatgggtggtggtgatggttacacgacaatctgaatgtgcttaacaccactgggtggcatgctgaaagatgggtaaagtggcaaatctcattttatgtatattttaccacaataaaagaaaaaagacctggggggaagaaacaagtgaccaactgagagattattgccaaaaccataacaaaggatgtgaatatataaagagctcttacaaatcaacaagaaaaaattaaaaatgggcaaagcacatgaacaggcaattctttttttttttttttttttttgagacggagtctcgctctgtcacccaggctggagtgcagtggtgtgatcttggcttactgcaacctctgcctcccaggttcacgccattctcctgcctcagcctcccgagtagctgggactacaggcgcccgccaccacactcagctatttttttgtatttttagcacagacgaggtttcactgtgttagccagaatggtcttgatctcctgacctcgtgatccacccacctcggcctcccaaagtgctgggatgacaggcgtgagccaccacacccggccacagtgagatacttttaaaatgcattagactgggaaaaaaatcagtttgcccataggcagtgttgagaagtcatgagatgtggattcaatgtggatgctgaacaaacatcttgcctgtattgattcccaaactgaacatcttccctaggcttctctgtttgagtaaatggcacccattgtctaagctcaaaacctggagttgtctgtgcatccttcctctgcctccactgccaaaatatattctagcccccttcctctctctttcctcactgctactgcacaggtccaagccttcatcatttgtcatccatcctagtctcctattccacttctgcccactatgatctattttccccatggccatcctcagttcaaaccctgcaatagctcctgctgttagcacaaaagtatccatttcttgccacaggcaagatccttcaggatctacttcattccctccatgttagcctcccgcttcccactttccccacctgtcctctcctctccagcactcagatttcctcactgcactcttattataattattattaaggtttgtttatttagttattatactggtaaaatgtacataacataaaatttaccattttcaccacttttaactatatcattcaatggagttaagtacactcacaatgttgtgtagccatcaccactatttccagaacttatcatcattccaagcagaaactctgtacctgtttagcaataactctccattctcttttcccctcaacctcgagtaacttctcttctattttctgtttctatgactttctgttgctatgactttttttttttgaagcagagtcttgctctgtcacccaggctggagtgcagtggcacgatctcagctcactgcaagctctgcctcctgggttaacgccatttttctgcctcagcctcctgagtagctgggactacaggcgccgccaccacacccggctatttttttgtatttttagtagagacgggatttcaccatg[137 bp omitted]ttgtgtctagtttctctcccttcctttccttccttccttccttctttccctccctcctcctcctccttcttctttttcctcctcctccttcttcttcccctcctcctcttcttcttcttcctctgtttctgtctctttctctctttcttcgtttcctttcctttgtttctctctctctctcttttccttcttttttacttgagatggggtctcactctgtcacccaggctagagtgcagtggcatgatcatagctcactgcagccagcctcccaagtagctgggactacaggtgtgcaccaccacacccagctaatgttttaattttttgtagagatggggttttgccatgttgcccaggctggtgttgaactcctgcgcttaaatgatcctcccaccttggcttcccaaagtgctgggattacaggcagtagccactgtgccaggctagcttattttacttagcatgatatcctcgaggtttgcccatgtgtggcatgtgtcagaatccccttctattttaaggctgaataatatcccattgtatggatggaccacattgtgtttattcattcacccatccatgaacatgggctgcttccaccttttggctgttgggaatcatgttcgtatgaacatgggtgtgcgagtgtctgttagagtctctctttttagccgggtgcggtggctcatgcctgtaatcccagcactctgggaggccaaggcaggcagatcacgaggtcaagagatcgagaccatcctggccaacatggtgaaaccccttctctactaaaaatacaaaaaattagttgggagtggtggcaggtgcctgtagtcccagctactcgggaggctgaggcaggaggatcgattgaacccaggaggcagagattgcagtgagccaagatcaagatcatgccactgcacgccagcctggcgacaaagcaaggctctgtctcaaaaaaaaaaaaaaaaaacagtctctcttttcattgctttagggcacaaatcctcagggtttttttgttgtttgtttgttttttgagatgaagttccactctgttggccaggctggagtgcaatggcgtgatctctacccactgcaacctccacctcttcggttcaagcaactctcctttctcagcctcctgtgtagctgggactacaggcgcacaccaccacacctggctagtttttttttttttgtaatttcagtagagatgaggtttcaccatattggccaggctggtctcgaactcctgacctcagatgatctacccacctcggcctcccaaagtgctggaattacagacgtgagtctccacacctggcccctcactgtcctttgaacataccaggcatggcccctgccgcagggcctttgctctggctgtgccctctgtctggaatgctctcttccagatctttccatagatggctccttcttatctaaccgtggtaccatcatgctgacccagccatcgctctccaccaagatactggactcctgccaccgtggacaggacacatcatcacctccctacccagagaaatttcacactagcctggctgggacaacctctatcattccaagcccctctgcatgcccttgaatcctgcctttggacctgcttcagatgccagacacagccaaggggaaatcataaggaacacatcaatcagggtggatgacaattgacaataacaaaaacaataattacactaatgtcaacagcagttataaaacaaggcggtgggacgggcgtggtggctcacgcctgtaatcccagcattatgagaggctgaggcgggcggatcacaaggtcaggagtttgaccttgtgtcaggcctggccaacatggtgagatcccgtctctactaaaaatacaaaaaattacctgggcatggtggcgggcacctgtaatcccagctacttgggaggctgaggcaagagaatcacttgaacccaggagaaggaggttgcagagagctgagattgtgccaccgcactccagcgtgatagacagagccagactccgtttcaaaaaaaaaaaaaaaaaacacaaaacacaaggccgtgcacagtggctcatgctataatcccagcactttgggaggccaaggtggagagatcccttgagctcaagagttcaagaccagcctgggcaacatggtgaaaccctatctccacaaaaaacagaaaaagtagctgagtatggcggtgcactcctgtaatcccagatactcaggacgctgaggcgggaggattgcttgagtctggaggcagaggttgcagtgagcgaagatcatgccattgcactctaacctgggtgtcagaccaagactccatcaaaaaaaagaagaaagaaagagagagaaagaaaggcaggcaggaaggaaggaaggaaggaaggaaacagaccaggcgcggtggctcatgcctgtaatcccagcactctgggaggccaaggtgggttgatcacctgaggccaggagttcgagaccagcctgaccaatgtggagaaaccccatctctactaaaaatacaaaactagccgggcgtggtggcacatgcctgtaatcccagctactagggaggctgaggcaggagaatcgcttgaacctgggaggcggaggttgtggtgagccaagatcgcaccattgcactccaacctaggcagcaagagtgaaactccatctcaaaaaaaaagaaagaaaaaaaaaaacaattataaaatagccaccgtgcatcacctttctaccttgtgctgagcatggtgctaggtgccttatgtgtgacatcttattgaatctggagagatgaggattatcggtgcaccatttacaaatgaggaaactgaggctcagccagaggaaagcacctgcctaaactggcaataccaggactcgaacccaggtcagtctgctgcatacctaccaggcaagtgctcctagctcaagtccccagggaatacaattaagcacaaatccacatagggtgggttgtaaaggctggaatggggcaggtgcgtcccactggcttcctgtgatttgtccacagcagcaagtaattagttttttttgtttttctttttacttttttttgagactgggtcacccaggctggagtgcaatggtgtgatcttggctcactgcaacctccgcctcccaggttcaagcgattctcctgcctcagcctcccaagtagctgagactacaggcgcccaccaccacgcccagctaatttttgtattttttagtagagatgaggtttcaccgtgttggccaggctggtcttgaactcctgacctcaggtgatcagcccgctcagcctcccaaatgctgggattacaggcgtgagccactgagcccggcctaattagcttcttattccatctcctccttggtttccatatccgccatgcaggcgccacacacatccccattttacagatgagaagaatgaggttcagcacggagaaatctctcgtttgaggtctcctaggaggattcatgtccggacagccaaactctagtccccaaggcggcaccacctggccctgtgcctggctgctcggtggcattttgctttattatttcccaggcgccctgttaatcgtccgcaccaagcgattagcacgtcatttatatatggcctggtgtctaattgtccagaccgtggagctggtggctcaaaacctcccttcctaattgtcttccctgcacaattagtaccttgttatatacagctctgtggtcgtctgcacttctgcagtctaccggcctcgcttctaattgtccaggctctgtaattaatgcctcaggatagggcttcctttcttctctatgcagttacagccatacttattcctgcagtagggctggggaagtgtccaagggaggaaaatgcagcccctgactccagggaggtcattgtcaagtgcggaagatgacaggccaaaaacacatgatgcctgggagctacaaatcctggttgtagagtggggcactgaccaaaggtgccctctgctgggagagaggtaatggaagctgggctttgcaggatgtataggagtttgtgaggtggaaaagcattccaagaaaagggaacagcatatgcaaaggttcagatgttggaaagagctaagtgtttgagtgggtaaaacacagtaataaagtctggctggagtgtagaactgtaacaggggtaaatttagggagaaagaaggcatagaaagggctttgaacactacattgaggggctctgatcttatcttctgggaatctatgatgggatttaagcaggaagagagacttgatcatggaaaatttttttaaaaagaaacaatcaggccgggcacaggggctcaagcctgtaatcccagtactttgggaggctgagatgggcagattgcttgagcccaggagttttgacaccagcctgaacaacatggtgaaatcttgtctctacaaaaaatagaaaaattagccaggtgtggtggtgtacgtacacctgtggtcccacctactcaggaggctgaggtgggaggatcgcttgagcctgggaggcggaggttacagtgacctgtgatcttgccactttttgaaaccctgtctcaaaaaagaaagaaaaagaaagaaagaaggaaaggaaaggaaaggaagaaggaaggaaggaaggaaggaaagaaggaaagaaggaaaagaaaagaaagaagaaagaaagaaagaaggaaggaagaaagaaagaagaaagaaagaaagaaggaaggaagaaaaaaagaagaaagaaagaaagagaaaagaaaagaaagaaagaaaaattagctaggcgtggtggcacacacctgtagccccagctactctggaggctgaggtgggtggatcacctgagcctggggtggttgagactgaagtgagccgtgattgcaccactgcactacagcctaggtgacagagtgagaccctgtcttggaaaaggaagggaaggggaggggaggcgaggggaggggaggggaagcgaggggaggggaggggaggcgaggggaggggaggggaggggagatggggaggggaggggagtcggggaggggaggggaatcgggcaggggaggggaggcaaggggaggggaggggaagggaggggaagggagggaagggaagggaaaagagaaaggacaagggctcaccctggttgctgtaggaagggtaaattggaagaggagagaacagaggccatgagaccagggaggaggtgatccctgttgtctagagctgaatgtaaagtggactgaagggatcagaggccatgaaaatggaaaggagcggatggatgataggaatgggcagaatgtgggtactgaccattgatgggtgacaatgagggaggagaggcagctcacgcccaggtctttgagcaaatgagcctcattctagcaaatgttgtcttctgatttggagcacagaaaccagctcaggtttagggtcacaggtgtgagagccatccctaaaactgcaggaataaatgcgtctgcctagagaaagatacaacagggacctgtgagcaagaaaccaacatttgggccagcatgatggctcacacctataatcccagcactttgggggaggccgaggtgggtggatcacctgaggtcaggagttcgagaccagcctggccaacagggcagaaccccatctctgctaaaaatattaaaaattagccggatgtggtggcacgcacctgtaatcccagctactcaggaggctgagaatcacttgaacccaggaagtggaggttgcggtgagctgaaattgcgccactgcactccagcctgggtgacagagtcagactctgtctcaaaataaaaaaaaagaaaaaaaaaaagaaaccaacatttgttgtgacaagccaataagattcagaatgatttgttatgtggcattaacacagcgctcgctgactgctacaagtctccatcaactgatggagagttccccaaggccaggctccttttgacagatgagaaaatggaggccagggacatactcaacacttttcatcccgtctggaccagacccatctacacatctctgaaatctccagctaggcaggaatccggactcccatagctgctctgtgaattaagaaactcaaggggttccaataggttctgtggtaaattgcccatgaaagtaccagagaaaaccttgctcggaggggagaagatctgtgatgatatatctacaggaaggaaaaaaaaaaaaaaagatttgggagctcagcagcggaatgttctataagaaccttttaaaagcaaacacaggagacacgagcagtttttaaaatgacagacaatacgaaggaagataatatatttaaaacctatatcagttgttaacagaccataaaaatacagctacattaatctgagctgtctgtcatgggctctcagagcagctgtgtgattttatagtttcgctcctaccagttttcttgacagtttcacaaatacatctcaatttatttggataaggacaatagaaaaatattgctcctgttttttcattcattctttctttcttctccctcttcttcctctgccacgctccaaacagctgggagatcttacggggctggccgtaagggctggtggggagggggtctcttttatttttattttcattgttttatcccattgggagaaaagtttctgtgggggtttaccttccccactgagtctcaggcttgtggggaaatagccggattggcagcaattgctgctgtgtgtctgtggcccagtgtctcaccttctctgaggtttgttagcaaagagtctacacacacctgctcctgatttcagtttcttttttttttttttttttctttgagatggagttttgctcttgttgcccaggctggagtgcaatggtgtgatctcggctcactgcaacctccacctcctgggttcaagcgattcccctgcctc[213 bp omitted]gcctcatcgccaagttctgccctccttagtcatggcaaaatccataccctttagaatcctccatgtcccccctaccccaccctgtcttccctgccctcccccctctccatctccccattactcactctgctgcagccacacagacctccctgctgttcctccagcactccaggtacggtcctgcccaagggctttggcacgtgtggtgccctccatctgaaagtcctccagccatctccagggctgctttcttttctgtttctttcttcctttttttttttttttttgagatggagtctccctctgttgctcaggctggagtgcagtggtacgatctctgctcacagcaacctccgcctcctgggttcaagcgattctcctgcctcagcctcctgagtcgctgggattacaggtgcccatcaccacgcctgactaattttgtgtttgtatttttagtagagatggggtttcaccatgttggtcaggctgctctcaaactcctgacctcatgatccgcccaccgcggcctcccaaagtgctgggattacaggcatgagccaccgcacctggccctcctttctgtttcatctgtcagctcaaaagaccaccacctcctcaaagagccaccctgctgcaaccaccctgggctaacgaagcctcctgggtccctccattcatatcacatcatcttctgttgtctgtcccagcacttcactagttaaaaatagcttaggccaggcgtgggggctcacgcttataatctcagcgctttggaaggctggggtaggaggattgcttgagcccaggagttcaagaccagcctgggcaacatattgagacttcatctccacaaaaaattaaaaaattagccaggtgtagtggtacacacctgtagtcccagctactgaggaggctgaggtgggaggatcccttgagcccaggaggctgaggctgcagtgagccgtgattgcaccactgcactacagcctgggcgacagagcatgactctgtctcaaaaacagaaaagaaaagaggccaggtgtggtggctcacgcctgtaatctcagcactttgggaggccaaggtgggtggatcacttgagatgaggagtttgagacgagcctggccaacaggtgaaacctcatctctactaaaaatacaaaaattagccgggtgtggtggcgggcgcctgtaatcccaattactcaggacgctgaggcaggagactagcttgaatctgggaggcggaagttgcagtgagctgagatcacaccactacacttcagctctgggcaatagagcaagactctgttccaaaaaaaggaaaaagaaaataaattagcttattcatttgtctgaccctcacaccagactgagccctataaactcagaggttttttttttttttcttggcttcttgtgtttactggtacacagcaggtgctcaatacatgcttgtgaagggaagaattcaaggggaagtgaaagtgaacaggactctcctagcgaggggcatggctggggtaagggcttggaggtggggacttgtgatgggaacttgtgaactccaagcgtctgaagtgggagcccagccttctcccgttccatggtaagttttgagtttccacgtctcaccactcaagcatcacagatcccatctccagcaccgtgttggccactctgggaactgctgcctgtccccatgtggccccctccccgtgacagccttctggccagagaccacgggtgcctcctttgctccagccctgccttcctgcctctccagcggaggcatcccagacgatgctgctgccacagatgaaactcacttgatgctggggaaggcccggcacagatgtccccagaatggaacatctgggctgcatgttgctggcagctggtgggaaccaggacgctgtgaagtgcacccacatctctgggaggctgggtggccctgagccgcctcctggtcctgccatctgtctgcggccaaagattccctgatggtttctctgggttaaggacccagagaaaggacccagaactgactgtcatttctaatttctccatctccctccctccccacttccttccatcatcgagacctggggctgtcactcttaattataccctggatccaagcatattgctccagctcactcccactgccctgcccgagccagaccagcaccatcatttgcctgaactagtgcaatagcacctattggttaggtctcagctacttccctgacctggcctcctcttgctcttcctgcctcactaactctgttccagccacgctggtctctctgctgttgtttgaacatgccaggtatgcggaagcctcagaggcttcgcactggctgttccctctgcctagaatgatctgctccccagatctccccatggcttgctcctcctcatcctccaaatctctgttcaaatatcacctcctccaagaagcccgcctgatttcccttgcacattcaatctccatggcctctctgaccccaacttctccctctctgctccagctgcacgggcctccttgctgttccttcgacacaccagacacagtcctgtcccagggcctttgcctgggctgtgccctctgcccagaaccctcctctcttttgcctgggaaatttctgcttatcttcttagccccagctgcaatgtccatcccccagctcctctccccagactcccccagatcccaaggacctgggtgtgtctgtgtctggctgtgtctccacagcagcctggaaccccctaggggcccctttgtacacagctggtcacacaatggccatcttaaaccatttcctgacctgaattcacttttccttttcagatgtctctcagcctgagtttccttccagaatttccatgaaccagggggttggctgcagtgtctgtttgaaagatgtggctgggggtatgaagggactgccttgaagctgagttgacatggcaggctcaccttttcaacttggatggtcagtttccttggtgtggctttggggttcctgatgaaggttttaaaggggtcaaaagccccccaaaccatccccttggcagtgcccatctccccctctggctacccagggtctcatccctctctgggtatctccttcgtggtccctgtttcctgctcccatcccccagtgcagacgtcacttaagggggtattgaactacatggtcagaggcaaagacaagcctggtggctaacactgatcctggaaccacgtggcctgggttcaggtcccaggctgctgcttttgttcatagttcacgatcttgatctctctgggtctcagtttccctatctctaaaattgagataatggaggccagacacgctggctcacacccatgatcccagcacttcgggaggctgaggcaggagggtcacttgagcccaggagttcaagactagcctgggcaatatagtgagatccctatctctatgaaaaaaaacatttttttttaaattagctgggtgcggtgatacatgcctgtggtcccagctactcgggaggctgaggtgagaggatcgctgagtctagggggaagaggttgaggcagcagtgagctatgattgaaggactgcactccagcctgggcaacagagtgataccttgtctctaaaataaataaatacataaataaaatgggcataatggtaccttcctgttcactttatgttaaaggattaaatgagttcatacgtgtgtgtacctaaaacagggggttgcaaaccactgaattatcagctgctgctattcttactatttttaatttttccaatctcccagggctcaaccccagccacgctgtcctctgctcctgagtacagggtctcggcccctcagctcctactctgaagcagccacggctgctggaagaaggttctggaagaaaggggaggggctgcctggcggctgctctccgtgccacatttgcagagtgagccgaatgtatttacttagaacagaggtttttgttgtggactttggggagtttggcggggcgggggtgggggtggggagaggctgaaggtcctcccaccaagagagcccctctgacggactagagccgctccagcatcgccagggacgaaggaattaaaaatcaagaccccattccagacatgccacttcgcgttgggtggcggggaccttgaagaaacccctagaagtgaccccgggggtgacctttgcctgtagcctcgctcagccaatgaggaagcccactgtgggtgcttggaaaccgtttccatgacacccaggagccgccggtccctggaagggcctggtctgagggtgaggggctcggatcgggggcggggggcgagatgcttgctcagtaaccatggcaacgccagcagctgcgggaggcaggcccagctggcacggaggcgcctgcccctcttccctccccaccgtcccggctctccttctggcacaaacaggaaggctgagacccagggacacctgtcatccgctccaggttgccctcccggaatgagaactgcaccctatagagtgttaacactgggggctccggtggagcccggtgggggccgggtcttaggaagcaaagcaatggggccgggcgcgtggcggctcacacctgtaatcccagcgcttttggagaccaaggcgggaggatcgcttgaggcccggagttcaagaccagcctgggtaacatagtgagatcccatctctactaaaaatacaaaaaaaaaaaaaaaaaaaaaaaaaaaatttagccagtcgtggtatcaggcgcctgtaatcccagcttcttgagaggctgaggcataagaatcacttgaacccgggaggcggaggttgcggtgagctgagattgtgccactgcattccagcctgggacacagagcgagactctgtctcaaaagaaaaaaagaaagcaatggggccaggcctggtgcgtcacgcctgtcatcagagaggagggcggggggaggaagggaggaaggagaaaataaaaaagacaagacgagacaagaagaggtctggaagtcttgacagggaaaatctggagggcttcctgatggaggtgagcgtgtcccaagcttcctcagccagcaccagggtgagggtggccaccacatcagtgccccacctgttccaagatttatttaacattttcttcccaactgaatcatgtcctcgctagtgagtgtatttaaaaacagcagctctgcttccctgaaaatggagagccggttgcacctgccacaaacagaaggtgggtggtaaaactcacatgacagaaacaaaacgcagttatttcattctagtgaggtgtcgctgcctgcccgaggctgggagcctgcagcctgtgattgctttgcctaaaaagaggattcgcgagggctaggaaagggttaaactcccctgattacccagcagagaccctgtcctttaaatcatcagaaggaaggaaagaggactggaaaggggctggctgtctcaccctgccagctaatgctatttagaaacttgttgggggacgatgtgaaatcactctgggccctactagtgaggggaatcctgacctacagaataaggatttggttaggaggagaggaaaggggttccaggagtacagtataagcaaaggctaggaggaaggactgaagagaagacgtgctgctgggagagattttctctgatgttttccaacaagggaggtgttagggggaaagccgatgaacaatgaggtctgagtgagcggggacctgaggcaccatctggggctgtctgggaggaggaagtattatctgggaggtagaggaagaaggggagggaaagagcagcaagagaaggagccagtatgggggacattggtgagcaggtgactggcatgggcacccggaacttgatcctgctgggtactactgtatgaggcgtgattcagaggtgtcccagcagaggggcgagggagctggggtatttatcctccaacaccagccaatccttgtctgagggctgctcctaggggccagtccctggcacacatgggtccagtgcagtcctgaggacagagaatgccagtgggtagagggaagcaggtgctggcagctgggacccatctggggacatgggcagggtacctgtggcatctgcctcatccccttttacagacgcatccccaaggtcactcagcaatgtgaggatttgaacccaggcctgtgacatcaagttccctgctgtttccacatcaccacagtggctgaatctactcccttgagaagtgtctgaaaacgaaggattccaggctcagataagtttaggaaggtacctccttcctccccaaccttggagactcagatttgtatagtaaaggctctgacaagtcctgcagataaaggacacctgttgaacagtttcccaggtgagcagaaacataggctctttttttttccttcttttttgagacagggtctggctctgtcatccaggctggagtacagtggtgtgatcatggctcgctgcagcctccaccttctgggctcaagtgatcctcccatctcagcctcccaagtaactgggattacagggacgcaccaccatgaccggctaatttttgtattttttagtagagatggggtttcactctgttggcctggctggtctcaaactcctgacctcaagtgatcggcctgcctcggcctccctcccaaagtgctgggattacaggcatgagccaccatgcccagcctgggcccagtgtcttttctaccctcttcacagctagaatatagtgcctggcatgtgacagatgtcctgtgagctcaatttcctcaatggataaatgaatgaatgagtgagtgcagatcctcatacccaccttctggataaggaagctgaggcacggagaggttaagttgcctggatgaagagctgggctttagccacctgacaccccagaacgaaggtttttaatcctgatactgagctccccaagagagccagagcgtagggagtgagaaggggagtagcagtgaaggagttaactgctcccccactggattcatcaggccttgggtcactttgtgcccgaattcaagaattcacgtagagtttccctctcccctggctcaccccgcctccagggggaagcatattcgtttccatggcaaccatgttgtcggctgtccgactaggtctgagtgacagctactggggccagatgaagtcactcgccacccacactggagacagaggagccggcccagaagtgccaacaccagagacaggcttgaggggtttacctcgtttgccagcaaggcggggagctggtcagggcgggggaaaatctccctgctggccgacatcccaccatgataactccgtgccttggtgtcttaaagactctgctggctccagggcttccgagagagcttagatcttagctgtgtctgcctgagtaccctgaaggagagattgcatctgatctattttataacacccactcccagcactgaacctggtacacagtaggtgcctaataaatgcttaggacgcaagggagggaggaatggagggagggaggaagagatgatcagccaaagcactttaattcttacctaacactcaagttatcttccaacattccacttatcaggcaggcttctcttatcagttaaccttttagttatcagcctacactttagttgtcagctaacacctaagttatcagctaacactttacttatcagctaacacctcagctagcatctttgtcagaaaatttcaggacaagctgaaaaatggagaactgagcctcagaaagcaggattcttgctttcaaatccctcctcttcttcccgcctccaccccactgacccccacgaggcagaaggaactgattatggccaacacggaaggattggaggcagggaagggcaggttctgggatcagagagaattccaaagtgaaaaatgcatgctcaattcttaaggaaggatttttcaacacctgtggaactgtccaaagcctgaatggattgccctaagtggtagtgaggtccccatcacaggaggtaaccaagacaatctgtaaaaccatgccaggaaaatgatgcaggaattggagtagggggatcctgagactcctttctttctgactctatgattgggtggcagttctaagactctacacctgggattcagcagccattcacaagcttccacgatgccacaggtctacgccctcattctaagatctctcgattagtcctaggactgaccagttttgaaaacatttattgcccacatgctgtgagccaggccctcttctaggagctgggcaccaaaacataaaatgggccaggcacagtggctcatacctgtaattccagcactttgggaggccaaggtgggtggatcacttgaggtcaggagttcgagaccagcctgaccaacatggtgaaaccccgtccctactaaaaaataaaaattaaaaaatgcaaaaattagccaggcgtggtggcatgcatctgttatcccagctactcgggaggctgaggcaggaaaatcgcttgaacctgggaggcagaggctacagtgagccaagatggcaccattgcactccagcctgggtgacagaccaagactccatctcaaaataaaagaaacagttacaatgatgggttattccatccagtgccatgggcagagagcaagcagaggaggaggggctctgggagtgactacaggagaaggattctttttgtttttttttttttttttgagatggagtctcgctctgtcacccaggctagagtgcagcggcgcaatctcagctcactgccagctctgcctccccagttcatgccattctcctgcctc[134 bp omitted]ggcctcccaaagtgcagggattacaggcatgagccaccgctcctggccaggagactctataggtgatccagacacttgtgctgagacctgaagatgatggagccatgtaaccaaagggtgttcctggctgaggggaaatcgccagggcaaaaacccccgaggcaggaacatgctgggcatgcttacaaaacagcaaagaggccaggcctggtggtttatgcctgtaatcccagcactttgggaggccaaggcaggaggatcacttgaggccaggagtttgagaccagcatggtcaacatagtgagactctgtctcaacaacaacaacaaaaaaatttaggccaggcgtgatggctcatgcctataatcccagcactttgagaggctgaggtgcatggatcccctgaggtcaggagttcaggaccagcctggccaacatggtgaaacccaatctctactaaaaatacaaaaaaaaaaaaaaaaaattggcagggcgtggtggcgggtacctgtaatgccagctacttgggaggtggaggcatgaaaatcgtttgaacccgggaggcggaggttgcagtgagccaaaatcacaccactgcactccagcctggggaacagagtgagactctatctcaaataaataaataaatagatagatactttttttttttaaattagccagacctggtagtgcactccaaggctgatgtgggaggatcacttgagcccaggaagtcgaggctgcagtgagctatgatcacgccactgtactccagcctgggtgacagagcgagaccctgtctcaaaaaacaagacaaaaacaaaaacagcaaggagacagtagagggggattggagggtgtgactgaggaggggccatctgagttgagaaggagccagaagtgcaaagcgccaggagtttccaagcagagaggacagcacgtaccaaggaccagtggtgggaatgagcttggagacacggacacacagaatcagagacagaccgaaacaaagagacagagacaggcgctcagggacaccctaacagagacagacagacaaagagacaagggtctctcattggccggcattatgggttacatcgtctctcccccaaaaaacctatatgctgaagtcctcacccctcagaacctccgaatgtactggaggtggtacagatgtaactggagtagggtgggctctaatctaatacgactgatgaccttataaaaggggacaatgtggttcatgcctgtaatcccagcactttgggaggctgaggcgggggggatcacttgaggtcaggagttcgagaccagcctggccaacatggcaaaaccctgtctctactaaaaatagaaaaattagctgggtgtggtcgtgggcgcctgtaatccaagctactccagaggctgaggcaggagaatcccttgaacctgggaggcggaggttgcagtgagctgaaatcgtgccattgctctccagcctgggcaacagagtgagaagattccttctcaaaacaaacaaaaaaacgaaggggcagggggacaatgtgggcacaggtatgcgtgcagggagaatgctgtgtgaatatgaagttgccatctacaaaccaaggagaaaggcctgggacagacccctcccttacatccctcaagaagcagcagccggccaggcatggtggctcctgcctgtgatcccagtgcttttcagaggctgagatgggaggatgcttgaggccacgagctcaagaccagcctgggcaacagaatgagacctcgtctctattaaaagtaaaaaaaaaaaaaaaaaaaaaaaatacccaagtgtggtggcacaggcttgtggtcccagctactcaggaaggtgaggtggaggatcacttgagcccacgaggtcgaggctgcagtgagctgtgattgcatcattgcactccagcctgggtgacagagcaagaccttgtctcagaaaactgaaagaaagggaaggaaggaaggaaggaagggagggacgaagggaaggagggagggagggaaggaggaaggaaggaggaagagaggcagggaggaagggaaggaaggagggcaggaagaaggaagagagggttgggaggagggaagaaggaagaggggggagggaggcaggggggaaggagggaaggaaggaaggaaagaaggaaggaaggaaagaagggagggaggaaaggaaggaggaagagaagggagggaggaaagaaggaaggaaggaaggaaaaaagaaccagccctgctggcaacttggtttcagacttctagcctccaggactgtgacatatttctgttttttgttggtttttttgttgttgttgtttgtttttttgagatggagtctcgctctgtggcccaggctggagtgcagtggcgtgatctcggctcactgcaagctccgcctcccgggttcacaccattctcctgcctcagcctcccgagtagctgggactacagacgcccgccaccacgcccggctaatttttttgtatttttagtagagacggagtttcaccgcgttagccaggatggtcttgatctcctgacctcatgatccacccgcctcagcctcccaaagttctgggattacaggcgtgagccaccgtgcccagccgacacatttctgttatttaagccaccagttcgtggtcacaggaaactcacacatcaggtaagccagtgaattaacaaatgactgcactgtgggagtcagaacagttttgcaaagctccatgtcaactcaggccaacctcacctctaaatgggggaacagaatgcagggaatcccccagttcagaggcccaaaccttgcacttgtttctccagaaggagaaagagctggagattgctcactaagctgagaacttttctatgtcccattgcacagcatcctccccacgaccgtgcaaagtaggaactcactatcccttttacagttgaagagactgaggctcagagtgggcactgtattgggcagcttacgaagatgtcctcatttgatcccacttctggtactcctgcccttgtggaatctcttctccttcttataaaggataaaatacagttgggcgtggtggcttgcacctgtaattatggcttattgggaggctgaggtaggaggatctcatgagcccatgaatttgaggctgcagtgagctatgataccatcattgcactccagcctgggtgacagagcaaaatcacatctctttttttttttttttttttttgagacagggtctcactttgtcacccatgctagagtgcagtggcatgatcacggctcactgcagcctcagttcccaggctcaggtgatcctcctacctcagcctcctgagtagctaggactatatgcatgtgtcactatgctcagctaatttgtttaaaaaattttttttgtagagatggtggagggagggtctcaccctatttcccaggctggtctcaaactcccggcctcaagtgatcctcctgccttggcctcccaaggtgctggtattacaggcatgagccactgtgcccagcctcttgctagctttgatgaagcaggctgatgtggtcaggaggcccacatggcgagaacctgggtagcctccgccatcaaggaactaagtattgctgacaaccatgtgaatgtggaagcaaatcctaccccgttgagccttcagatgagactctattgctggccaacacctcgtgacagcctgaagtacaggacccagtcaagctatacccagattcctgatctgcagaaactgagatcataagtgagtgttgttttaagccactaagttttggggtagttttttacacagcaatagctaaccaatacaaacaatcagttgcctgaggtcacgcaacaaaaattaacagagtcaggctggttgccgtggctcaggcctgtaatcccagcactttgggaggccaaggtaggcagatcacctgaagtcaggagtttgagaccagcctggccaacatgggaaaaccctgtctctactaaaaatacaaaaattagccaggcttggtggcacatgcctgtagtgccagctactcaggaggctgaggcaggagaatcacttgaacctaggaggtggaggttgcagggagccaagatcacatcactgcactccaacctggatgacagagtaagactctgtctcaaaaaagaaagaaagaaagaaagaacgaaaaagagaaagaaaagaaagaaagaggaaaagaaaaggaagaagggagggagggagagagagagagagaagagcgcaaccaagagagagcgcaaccattctccctcacagggaagactgctggctgcggcaaaggatgagtgagaaggccaaaccctggggtttcctttcctctcctggcaccagggctgtgtcgctgtccgtggtactgaacggtgctggtaggagcggcttaagggagggtggagcatctcctgttccctgctagcagctccttggtagggagcctgcactgtccacatgcagggctgcgaaattcggggctttcaggaacttgcatggttctttcacagaaccacctccctggctccgagcttggtgacttctgctagcttgagcctctccttctggggaggctggcctcccaaatcccacctggccccaaaccctacctacccacgtgagaattcaggggatcctgggttgttggggtaacagacccaatcagttctctgtctctctgtctccttgtctctgtctttgcaactgtctttgtctctgcctctctctctattctctttctgattttttatttttctctgtggctttctttctctgcccatctctgtgtcttcctatctctgtgtgtatctgtctccctgtctctatctctgtcttgtctctctgtctttattcctgtctttgtctctctgtctctgtgtctctttgtttctgcctgtctctctattctttctttttgtctctgtgtctctgcccacctctgtctctctgtctctatctctgtctttgtctctgcccatctctctattctctttctatttgtctctgtctgtgtctctctccacctctgtacctctctgtctctgtccgcctgtctttctatgtctctttccgtctctctgtgtgtgtctctgtctcttcctctctttctggctttgtgtctctgcatttctttccagttctctctcttgctctccaccactctaaaagccacaaacccttctggctgacctgcaatgggcccaactttctccagccacctgaggagagggaaaatgaagcaaagaccccagccactcacccagcctgcattcaccacttataagcgacagggttttggggcataaacggcccttgaggctaactcctgccccagtccgcctctgcctcccatcatcccttgtcaccatctacacagtgacatgattgataggagatctttcactgcctctgattcccaagggccgctccccgctccacacctaaaaacaaacctcattagcccccaaacacctggaagcagggaacatgaggggtgtgaataatttattttgtgagtcattttaatattttataataattgcgaggagtcatttggtattgtgtagctgtttgagtgtcattaagacagagccaaggctgggcgcggtggctcatgcctgtaatcccaacactttgggaggccgaggtgggtgcatcacttgaggttaggagatccagaccagcctggctaacatggtgaaatcttgtctctactaaaaacacaaaaaattagccgggtgtggtggcatgtgcctgtagtcccagctattcgggagactgaggcaagagaatcgcttgaacccgggaggcggaggttgcagtgacctgagatcatgccactgcactccagcctgggtgacagagcaagactccatctcaaaaaaaaaaaaaaaaaaaaaaagaggaagggatgggccctgccaccagggtatcttggaatctatcgaggtgagccatctccaagggggcatgtggctgggggccaggctgaaggaagaaggcagcctcaaagcatattgagggtggccggatgccacttagtaatcggtgagcagtgaatgggccaagactgcagctctgtcttagtcctgtttcattcactcattcattcattcatgcactcattcaaactctcccccggggtcctttattacacttgaatcaagctcaaaccctccaccgtggcctaaaagacccccccaggctgggtgcagtgactcatgcctgtaatcccaacactttggaaggctgagatgggaggatcgcttgagcccaggaattcgagaccagcctgagaaacatagcaagacccctgtctctacaaaaactacaaaaattagctgggcgtggtggtgcatgcctgaagtttcagctacctgggaggctgaggtgaaaggatcacttgagcctgggagatcaaggctgcagtgagccatgatttgcaccactgtactccagcctgggcgacacagcaagacctcatctctaaaaataaataaataaataaataaataaataaataaataaataaataaataaataaaattataaaaagaataaaagggccgagcgtgttggttgatgcctgtaatcccagaactctgggagaccaaggcaggtggatcacttgagcccaggagttcaagaccagctaagcaacatggtgaaccccacctctatctaaaatacaagaaattagccaggcgtggtggcacgtgcctgtcattccagctactcgggaggctgaggtgggaggatcgcttgagactgggagatggaggctgcagtgagctatgatcacactgctgcactccagcctgggtggcagagcaagaccccatctctaaaaacaaataaaattataaaaaataaaagaccccctttcccttcaaaatccagccccttaagccttcatctcctctcctgcgccccattctgctccagccacactggcctccttgccactcctccaatgcacaagcaacttcccacccctgagcctttgcatttgcagccccctcctcctagcatgccctgccctggactcctcccgtgatgagctccttctcatccttcaagcctcagctcacacatcgcctcccggatctcacagtggtaggatttagagagggggcgtggggtaggagggtgtgcttggcagggagctccgtgtgggcaaggacttggtgccaagacggttgagactgaatcagctgaatatgaagatgggcaggtggagaggtgggtggggctgggaaaaccgggttgagggaaaagatgcctggaagaagaaggagaaaaaaaaaaaaaaaaaggctaggggctgggttccagagagcctcaaagatgaggatgaataatctgggctccatcccggaagaaaggacttgagaactattccttatttcttcatggagctgggtcacgctccaccttcactgctcattcctccgcatggtggattccgcattgtctcaagtccctccatgctcatgagcccaattctagccagtcacttgggccatttcttccctctagagaacctcattatgacccacactgatgtggcagaaaacgtctggcatccattaaaaaaatccatgcctcacttcccacaacgtagagttaccctgggaagtggctgcccacccatggactacatttcccagatgcccttgcattaggtatgatcatgtgacatgttctgaccaatgggatgtgggtggaaaggataagtattattcccaagtcaaatacgtcttagttccccacaaattaccataaatgtagtgacttaaaacaacgcaaaattattatcctagagttctggagatcagaattctaaaatgtggaaggttgtgtttgctctgaagactctaggggagaagctgttccctggtcttttccaggttctaggggctgaccacatttctaggttcacagtctcacatccctctgacctctgcttctggctttgctctttgatgctcctgctttcctcttataagggcccctgtgatgacgttggattcacctggaatctccaagaaaatctccccatctcaaggtctataatttaatcacacctgcaaaatctcttttgccatataaggtaataaattcacagttgtgagagttctttatgtattctaggtacctgttccttattagatgtatgatttacaaatattttcttccatcctctgggttgtctattcactgtctggatggtgtcctttgaaacacagcattttaaaattttgatgaagtcctatttatctggtatttctttggttgtttgcgctcttagtgtcatgtctaagaaactattgccagtcccaagatcatgaaacccctttgtttttttttccaagagttttattgttttaactcttacatttaagtctatgatgtattttgagttaagttttgtgcttggtgtgaggtagggattcaactttacccttttgcatgtggatatccagttgtcctgaaatcatttgttgaaaagattatttgtttctccattggattgtcttggcccttgttgaaaagcaattgaccataaatgtcagagtttatttctggattttcaattttctaccgtggatctaaaagtctatcattgcgccagtaccccattgttctgcctcccaggttcacgccattctcctgcctcaccctcccaagtagctgggactacaggcgcccaccaccacacccagctaattttttgtatttttagtaaagacggggtttcaccatgttagccaggatggtctggatctcctgacctcgtgatccacccacctcagcctcccaaagtgctgggattataggcgtgagccactgtgcctggttgatataaggtttctaatcagaaagtgtaagtccttcaacttcattatttcatttcaagatgattttggatactctaagtgccttgaatttccatataaattttagaatgatcaatttctaaaaaaaaagctgagattttaatagggattgttttgaatctacagatcggttaaggagtattaacaatattacattttctaatccatgaatatgagaggtttttatttaggtcttaaatttctttcaacaatattttatagtgctcagagtataaattttgcacttttctgttaaatttactcctaagtattttgttctttttgatgctatcataaagataatgattttcctaatttcactttcagattgttcatttctaatatatacaaatgcaattaactttgttttctccttttttttaattttatttttccaaatttttacacttaaaaaaaaaattgattcttggcctgggaagtcgaggctgcagtgagctatgatcacatgattgcactccagcctgggcaacagatagagactctgtctccaaaaaataacataacataacataacataacataacataacataacataacataacataacataacataaaatagttcagcaaagttgaaggatacaagaccacgacacaaaatttgttgcatttgcttgctcag[142 bp omitted]aaaccccatctctactaaaaatacaaaaatttgcttcctgggttcaagtgattctcctgcctcagcctcccaagtagctggtactacaggtgggcaccatcatgcccggctaatttttgtattttgagtagagacggggtttcgtcatgttagccaggctgttcttgacctcctaacctcaagtgatccacccatctcggcctcccaaagcgctggga[144 bp omitted]cccgagtagctgggaatacaggcgcctgccaacacgcccggctaattttttgtatttttagtagagagcgggtttcactgtgttagccaggacgatctcgatcccctgacctcgtgatccacccacctcggcctcccaaagtgctggaattacaggcgtgagccaccgcgcccggccgtgcctggccttttttatgtttttatttgaaatccgtatatcctctttggcgaagtgttgttcaagtcatctgcctgttttttggtgtttttttttttttttcctcttctgtttcgagacagagtctcactctgtcacccctggagtgcagtggtgtgaggacagctcactgtaacctcaacgtcttgcgctcaagcaattctcccacctcagcttccccagtagctggaacggcagacacgccccactacgcccagctaattttttttttaagaggtcaggtttcactattttgccctggtttgtcttgaactcctgacctcaagcgatcctcccatctcggcctcccaagtagctgggacttgaggcgttcaccaccacacccagctaattgattaattttttgtagagatggagtcttcctaggttcccctagatggtcttgaactcctggcctcaagcaatcctcccatctcggccttacaaaatgttgagatcacagctgtgagccactgcaccagatcactttttaactttttatttatagaaaaatgtacaatatgcagttgtaaaaataatacagaaaaacatggcagtaaatcggggtttttctgttttttgtttgtttgtttgtttgtttgtttgttttgagatggagtttcgctcttgttgcccaggctggagtataatggcacgatctcggctcactgcaacctctgcctcccggattcaagcgattctcctgcctcagcctcctgagtagctgggattacaggtgcttgccaccacgcctggctaattttgtatttttagtagagacgggtgtttctccatgttggtcaggctggtctcgaactcccgacctcaggtgatccgcctgtctcggcctcccaaagtgctggaattataggcatgagccaccatgcccagctggcagtaaatcttaatgactttgaattaggcaattatatgataccaaaagcagtaataaaagaaaaaacagattgattggatgacatcaaaattaaaaacgtttgtgttgccaactgataccatcgaaaaagtaaaagtacaatctataaattggggaaaataaacttgtatgcaaatgtgaaaagaactctcaaaactcaaaaataaaaagattaataacccaatttttttttttaacggattctcactctgtcgcctaggctggaaggctggagggcagtggtgcgatcttagctcactgcaacctccctctcctaggttcaagcgattctcctgccccagcctcccgagtaactgggactacaggtgcctgccaccacacccagctaacttttgtatttctagtagagacggggtttcaccattttggccaggctggtgtcaaacttccggcctcaagtgatctgcccacctcagcctcccaaaatgctggaattacagacgtgagccaccacgccaagcctaataacccaatttttgaaatgggcaagtgatctcagtaaacgtttctccaaagacaatatacaaatggccaatggtcacatgaaaagatgctcaacttcattagtcactaggaaaatgcaaatcaaaaccacaatgagataccacttt[138 bp omitted]atggcgaaaccctgtctccaccaaaaacacagaaattagccgggcatggtggtgcacacctgtaatcccaactactcgggaggctgaggcaggagaatcacttgaacccaggaggcggaggttgcagtgagccgagattgtgccacttcactccagcctgggcaacagagtgagactccgtctcaaaaaaaaaagttaaaataaaaaaatatgtgtatgcaaatctttttttcttttctttttgagacagagtcttgctctgtcacccaggctagagtggagtgatgtgatatcagttccaccatgaccagctaattttttgtatttttagtagaggcagggtttcactgtgttggccaggttggttttgaactccagacctcaagtgatcctcctgcttctgcctcccaaagtgctgtgattataggcgtcagccaccacgcctgaccccatgcaaaatcttaaggataaatgttgatagcagtattattgataacaattcaaaaagtgaaaacaatctgactctccatcaactgatgaacagaaaagccaaacgtggtccgtccacacaatggaatgtgtttggccatgaaaaggaatgaagccctggtataggttacaacgtgggtgaaccttaaacacatcatgctctgtgaaagaaaccagacacaggccaggcacggtggctcacgcctggaatcccagcactttggaaggccgaggtgggtggatcaagaggtcaggagttcaagaccagcctggccaagatggtgaaacccccatctctactaaaaatacaaaaattagccgggcgtggtggcaggtgcctgtaatcccagctactcgggaggctgaggcaggaaaatcgcttgaacccggggggtggaggctgcagtgagccgagatcgtgccactgcactccagcctgggcagagcaagactctgtcttaaaaaaaaaaagaaaagaaaaagaaagaaaagaaagaaagaaaccagacacaaaggccacatattgtatgatcttgctcatatggaatttccagaacgggcaaatccagacacagaaagtggacttgtgagtcgtggtggccaggggctggggaagagattgggagtgattactaatttggtttcttttttgtttgtttgttttgttttgtttgtttgttttgagacagaatctcactgtgtcgcccaggctagagtgctgtgacatgatctctgctcactgtaacctccgcttcctgggttcaagcaattgtcctgcctcagcctccaaagtagctgggattaaagaacccgccaccatgcctggctaattttgtatttttagtagacacggggttttgccaatgttggccaggctggtcttgaactcctgacctcaggtgatctacctgcctcgtcctcctaaagtgctgtgattacaggcgtgagccaccgcgtccagcctaattggtttatttctttcccttccttccttccttccttccttccttccttccttccttccttccttcctttctttcctttcttttccttctttctttcttctttcttttttacagagtctcgctctgtcatccaggctggagtgcagtgacgcgatctcggctcacggcaacatccgcctcccaggttcaagtgattctcctgcctcagcctcccgaatagctgggacttcaggtgcgtgccaccacacccagctaatttttatatttttactaaagacagggtttcaccatgttggccaggatggtctcgatctcttgacctcatgatctgcccaccttggcctcccaaactgctgggattacaggcgtgagccactgtgcccggccctaattggtttcttttagggtgactaaaatattctaggtcgggcatgatagctcatgcctgtaattccagcactttgggcggccaacgtgggaagatcacttggggtcaagagttcgagactagactagccaacatggtgaaaccctgtttcactaaaaatacaaaaattagccgggcgtggtggcgcgcgcctgtagttacagccactcgggaggctgaatcgagagaatcacttgaacccgggaggcagaggttgcagtgagccaagatcatgccactgcactccagcctgggtgacaagagtgaggctctgtctcaataaagtataacatagaacattctaagattatattgtaaagatggttgcacatcatctcagctctgtgaatttactaaaaaccactgaattatatacttcaaatgggtgacttgtatgatatgggaattatttcaataaagatgtttttaaaaaaagtaaaaaatgagtacagagagatctcttgtgcctttaaccagcttcccccaatggtgacatcttacaatatcataaacgggaaatgaacattaacataatccatcaaccttattcagactttgctggtttatgtgcactcatttgtgtgtgtgtgtgtgtgtgtgtgtgtgtgtgtgtgtgtgtccatgcaacatttagatgtgtagtttcacaatcaggacacacaacacattccattatgaggatgttctgtgctgcacttttttttacgtcacaaccatctctctcttcctcctacctgaaaacccttaccattcttcatcttataattctgtcatttcaggaagcctgtatcagtggaaccgcatgctctgtaaccttcagcttttgttgttgttgttatgtatttctttttaattacgtgggtacatcgtggtgtatatatatttatggggtacatgagctattttggtgcaggcatgcaacgtgtaataatcacatcatgaaaaactgggcattcatcccctgaagcatttatctttcatgttaggagcaatccaattatacctttatagttattttattttgttttatttaattttattttgagatggagtctcactctgttgtccaggctggagtgcagtggcacaatctggggtcactgaaacctcctccttccagcttcacacaattctcctgcctcagcctcccaagtagctgggattacaggcacctgccaccacgtccagcttatttttgtatttttagaagagacagggtttcgccatgtcatccatgctgctcttgagctcctgggctcaagcgatcctcccacctctgcgtcccaaagtgctgggattacaggtgggagccaccccgcctggcctctttttgtcattttaaaatgtacaattaagttattattgactggctgggcacggtggctcaagcgtgtaatcccaacactttgggaagctgaggtgggaggatcacttgagcccaggagttcaagaccagcctggatgacatggcaaaaccccttctctaccaaaataactacaaaaattagccaggtttggtggtgcatgcctgtagtctcagctactcgggaggctgaggtggaaggatcacttgagcctgggagacagaggttgcaatgaatggagatcacgccactgcattccagcctggacaacagagtgagatcctgtctcaaaaaaatacatatattattgactatagtccccgcgttgtgctatcttactaggtctcttactcattcatcctttttttcttttttggacctatgaaccatccgttggacctcaccactccactcctctataacctttgaagactggctcttgtcatttcagcacagctcccgtgagagccaacctaagttgctgcgtttctcaatagttccttcctgttcattgctaagtagaattccacggtctggatggagcacaatttgtttaaccgttcacctgttgagggccatttaggttgcttccagcatttggccattttagaaggaagctgctctgaacattcacttctgggtttttttgtttgttttttgttttttgagacagagtctccctctgtcacccaggctggagtgcagtgatgtgatctcagctcactgcaacctccgcctcccaggttcaagcaatcctctgcctc[222 bp omitted]cctgggatataaatgcccaagaatgtaattccagggtcatatggtaagtgcatggtttgttttgtacaacaaaacaaaacacagtacagcaaacagaacaaaacgaaatcctgccacactctttttccacagtggctataccatttcacatctctgccagcaacataggactgagtgatctatttggtcttcatccttgccagcatttgatgtgatcaacttttttttttttaatttagccattttgatgggtatgtagtgatacctcattgtggtttggatttgcaggtccctggtggctaataactttgaacattctttcatgtacccatttgccatctgtatctcctcttcagtgaaatgtcagtttccgtctatgtccatattttaattgggttgtttgttggtttttgttttttttttctggagatggagtctcgctctgttgcccagactggagtgcagtggtgctatctcagctcactgcaacctctgcc[134 bp omitted]gctatgtgatttgcaagtagactcttccaaaccatagcttgtcttttcaccctctctaacggtatagtcttttgcatagagcagaaatcattaatttggatgaagtccaattcatcagtttcttcctttatggctcattcttgggtgtcatccctaagaactctttgcttaacctcatgtcttaaagattttattttgttttgttttaaggagcagagagttcaataggcaagaaggaagaggaaagaaggaagcagctccctatagagacacagcaggaggggaggctccaaagccaagagaggagaccctattgaagatttttttctcatgttttcttctacattttacatgtagacctgtgtgatccctttttttttttttttttttttttttttttgagaccgagtctcgctctgtctcccaggctggagtgcggtggtgtgatctcagctcactgcaacctccgcctcccgggttcaagcgattttcctgcctcagcctcctgagtagctgggattacaggcatgcatcaccacgcctggctaatttttgtacttttagtagagatgggttttcaccatgctggccaggctggtcttgaattcctgacctcaagtgattcacccacctcggcctcccgaagtgctgggattacaggcctgagccaccgtgcctggcccctgtgatccgttttgaattccattctgaatgtaaaaaatagcagaagcgggtttgattcgggggaccctagggagccaatgagggttcttgagtgagagaagatacagttggcaagaagaatcaggtgagtagactcaagtagcccatgacagcctcgctctcagcctcagtctccccccaccggcaaactaacgagaccagaagatctctaaagtccgctgtcatcaaatgaggccacctccctggacgtttgtccccatattccctgcgcctctggagcagactcaggtcaaaccccagcgcctgcacaacgtgtgtgagcctctgtgtcccagtgctttgatcttaagagtgactcagtgggacagcgccgagagctcactcgaccccaaaaaactgtggctcttttttctctcagacggcaaaatcaggtcatatttcaattccagtcattctccttcatatataaaatgtgccaagaaccactttcccgaaaatctaaattgaaagtaaatagcacgggggacaattctcggtgataaaactgcggattctggagcttcttgggataatatttattctcccttcttgctaatggctccagctgcctccccaggttattaaagtaatgcgtttgcttaacctgactggggccgcatcccaccctgggctgattgggccccgcgtgaagccccccgccacccccctccaccggacaattatattaacggctgctggtttgcaattactataaatcagaaagcgcgtcggcctgggtttgtttttctttattgaaaatgtttaaacctcatgcattgcaaatatcaccgcctcagaccgggatttaactctttccttgagacttggaggtacagctctggagggctttgctggggatagtgctaggataatccctgctttctgagatgaggaaattgaggctcagagaaggaatgccatttgcctggggtcacacagctggtgggtcactgcactgaaacggcactgagttttttgtttgtttttttcatgcctgatgaagttacattctttgtggcaaatatttaaaaatgttgagatctgttatctcagcaaaaaccacccccagttctgcgggggtgggtgggtgtgtgggtgggatatatccttccagagatttttttttctatgcatatatattctggcatgcaccaaatgaatgcaggtttaatgaattatgccttccataagcaccgaggtgtttattgagcacctactgtgtgctgggtgctgttttatgtgctggggatacaggaagcaaaacaggcttatctgccggtagtttcaagcataggggacagccagggcaaggaccctgaggctggctcttgcctggcacacaaaggggcgaataagcacaggcgtggagagtgcaaggggcaaaggcagggagggtgaaaagagcattccgtgtggaatcagagggagaggagagggcttcatggagctctccaaggtagagtgctgaggtttgctgaggatgtgggtgggaggaagaggaggcagggagaccccaagattccctctgagcagctacaagggctgacctcagctgagatggggagatgcaagaagagcagtttagggggtccggtgcagcccgacatggctgtgttgagtgtgaaatgcccatcaaggccaagtttggagctggcggaggcccagactggagacaggactgtgggtatcagtgggtgtagatgggtttagagccccgagagttaatgaggccgacctggaagggtgtggatagaggagcaaagaggcctgagaacccagcccttgaccagcaatggacagagagagggacagaagagggacccagagaggtagaaggaaaggccagtgtttccaggaggggcggggcaccagccggtcagacgccgtccagagggacgaggaataggatggggcgggtcaacgctgacttctgtcagaggcgtttgaaccaggacaactccatcttggatagggactgggtaaaataaggctgagacctactgggctgcattcccagacagttaggcattctaagtcacaggacgagatagcaggtcggcacaaggtacaggtcataaagaccttgctgataaaacagcttgcagtaaagaagccggctaaaacccaccaaaaccaagatggcgacaagagtgacctctggtcttcctcactgctacactcccatcagcaccatgacagtttacagatgccacggcaacgccagaaatttaccctctatggtctaaaaaggcgaggcatgaataatccaccccttgtttagcatatcatcaagaaagaaccataaaaatgggcaaccagcagccctcagggctgctctgactatggagtagccattcttttattcctttactttcttaataaacttgctttcactttatggattcaccttgaattctttcttgtgcgagatccaagaaccctcccttgggacctggatcaggaccccttcgggtaacactttgacaagggcagcttcagtggcggaaggtgtgagaggccaggctgatgggtggagaaggctcaggagaaagaaagagaacagaagtgcagacagtgagtgtagacaactcaatctccaggagtttggccataaaaagaggcaaggaggtcgggcgtggtggctcacacctgtaatctcagcactttgggaggccaaggtgggtggatcacctgaggtcaggagttcaagaccagcctgaccaacatggtgaaaccccgcctctacttaaaaatacaaaaattagctgggcatggtggtgtgcgcctgtaagcccagctactcgggaggctgaggcaggggaattgcttgaaccaggaggcagagtttgcagtgacccaagatcacgccactgcactccaacctggacaacagagcaagactccatctcaaaaaacaaacaaagaggcaaggatatggttggtcaccggagggggatgtggaagtttactttttccctataagatgggacctgcccagcagagccagaagatgttaccgaagagaaagggccaagtgctgaagccaaatccttgggtggggacacagagcctgtgtttatcctgcctctattgcctactctgtaaaacaggcataagaacagtatccaggccgagtgtggtggctcacaccggtaatctcagcgctttgggaggctgaggcgggcagatcgcctgaggtcaggagttcgagaccagcctggccaacatggcgaaaacccgtctctactaaaaatacaaaaactagctgggtgtggtggtgggcacctgtaatcccagctacttgggaggctgagataggagaatcacttgaacccgggaggtggaggttgcagtgagccgagaccgtgcctttgtactccagcctgggtaaaaagaccgaaactccatctcaaaaaaaaaaaaaagaacagtatccatcacccaggcatgatctaggcacccagcaaaagtccaggctgatgacatgtctctctcccctgtggtgtgtctatgaaggggtcaccccctgctccagtttgtggcagaatgcagtttccctcctgacacccacccccaagggagatagacagtctccaggaaaaactcagtgagttccccctttgagaaagggccccacaagtcaaagtgctttttcaaaaataaatagcctgattagcataaggtatgcaaatgtatgctaatgtgacaactattaaaagatttcaaatgtcatcgagggaaaacacaccgggcctggctggaggggtgggggacgggaggagaggatgcagccaggactcttgagaaaggtcgaggggctcaaccgcaagatcaccaggatacacactcgtacagacacacacaaactcacactcacacccgggtcattccagggtggccttaagtcctctcctgggcagaatccccaaagctctgtctccaggtgtgagtattaagctcctggaaaccctcctccaaatctttcccccaacacactctaagtgcctgaaaaactgtccagggtgacaatgcgtctcattccaccaagagcacacagatttgttctgcaaataatctctgggaaaagcagtaacagcatgggtgacagaccccagagcctttcctgagaataggttaaaacggtagtctcatccatgacaaaaaaaaaaaaaaaaaaactcctaagaactggtaagagatggctcctatccataataaatcctccctcacttcaggggaaaattttcatccatatccactttgttttctgaggctgacagacaaaaatcagacccagaatggggagagacttttcccagggtcacacagctgtgtgtgtgaccaaaactatcaccaaactaatcaccaaaactatttggtgtgttgttgttgtttagagacagggtcttgctccattgcccaggctgcagtgcgatgctgctatcacaactcactgcggcctgaaacttcttggctcaagcaatcttctttgcgaggatctggcctgcagaccccagcttgcacgatggatgaataatgtacccagacactgatattcagtgaaagagcagctacgggtcgagccactcacagacaccacggaaggtgctgtaaagagtcagcagccacagtcccgactagctggccctgagggcatttatttagcacagttttgtttgtttgtttgtttgtttgtttgtttgagacggagtctcgctctgtcgctcaggctggagtgcagtggtgtgatctcggctcactgcaagctccacctcccaggttcacgccattctcctgcctcagcctcccgagtagctgggactacaggcgcccgccaccacgcctggctaatttttttatttttgtatttttaatagagacggggtttcaccatgttagccaggatggtcttgatctcctgacctcatgatccatccgcctcggcctcccaaagtgctgagattacaggtgtaagccaccacgcccccggcctgagcacagttttaacgacaaaggctttgagtcaacacacctgtgggtaattaatctggttgctcccaccccgggagagccatcttacccatgagtgatcagttagttttaggactgagtaaacaagcgcgttagacaaactcctctacattcctacgcatctacgccctgagcttttaagagaactcagctgccttcagccaagacttttgctaaagctatgcaaacctctcggccttccaagaaggtctgtgtttatttcctctaaaatcttttcctccaccctgactgaacccccacacctcttgcctcagcctcccgagtagctgagacttacagacatgtgccaccacacccaggctcattatttttatttttggagagatggggtcttgctatgctccacaggctagtttccaactcttggcctcaagtgatcctcccaccttagcgtcccaaagcactgggattacagacatgagacaccatgcctggccaccaaaactctttggtgagaccagaattattgaaatcattttcagatgagaaaactgaagatcagagatgtgaaatgatttgccccagctcacacagcaactgtgaggcaggtcaggtcagctgctcaaacttcagctgcccaaatttcaatccatcttacatcacctttctactacttctactattatttcctgaatatttttcttctaatggacccacttcttaaaaccttaaatgtatttagaaggaaattgtttatcatgactgtaaatgaaaagccagaatcactgaccataagtagaaactaacttaatgagaataaaatcatattattaatttctgacgaaagatagttgcctctgagctctgagctggagcctgatctctctctttgtccaaaaaggatatttcacgtgtccaagaaggtgttaaagactgattcacacccagttaagactttcttcttgcaaaagacatgcaaaggaagagctctctccctataagagtccgtggtgttaagactgtttcatgcatcacctaaaaccgtctcatggccaccaggctgggctctatctacctgaagggcaggaagactgtcccaataccttagagttctagaattatggccagggatctatttgggggctcatactatcagtgcccacggccatttcagtgcagcccaaagatggagaagagatggcttcactgataaacagactcacctgtccatccacctatccattcatccacctaccatccatccattgacccatcaatccacccacacatccatccatccacccacacatccatccatccacccactcaccacccctccacccactccacccacacatccatccatccactcatccatccatctgcccatccatccatccatccatccatccatccaccattcacccataacccatccaccattcatccacccaccatctgcccaaacatccatccaaccatccatccatccatccacccatccaccacccaatcatccatccatgcatctactatccacccaccacccatccatctacccatccattcacccaaacatccatccattcacccaaacatccatccacccacccatccatcttcccactcagccatccactcacctattcagtaaatatatatccagcaactactctatgccaggcattgttctagaatatggatacatagtggtgaccaagacatacgtggtcaccaaccccttgaggcttctgaaccagtgaggacactctccatccctcgagcaacaacatgaggcggattagagaatttttctccatttttttttgtgacaagggtcgtcttggtagatatttgtgggtattccctgaccttcattcttccctccacctgtaggacgcagaagcaacctggtttcgccgctgcctggctgctctccaaacccatttcctccttcttcagggcacatagcaaggtgtttcccagcattccttgcagttggggcagccatgtgacttaattgagccagtggaaggtgggcagaagtgatgtggccatgacttacgttctggcccaggctctttctgcaacctacactttaaagatggaggaggtacaagacagcggggcctgatccctgagttactaggtggaaacaaaggaacacctgtttgctctttatatgagcaacaaacttctgttgggtcattgaggcttgccagtttataatggcagggagtgttaccttaaccaatgcacacgtttcctcttttccaaccctgagagggaattggttccacctctggctccagccaatcactgaagcctattcctgctgacttcctgattagctcagcctggtcatgtgactgaaggacgcagatggcaatattggatgggtttctaggcatcatagcttggagggccactggggttgctggaaccaggacacagaactcgagaactgggcttctaacattcgccactgggaaagaaaaaaagaaatgtattatttattgttactattattttaatatcctgcaattgaaactggcctatttcctggatgatccaaatttaggaactttttcctgcagctttaatcatcctgaagatgccctgacttctgtctccacccagacttggccccagatctctctccagttcctcctggatgcctcctcttggaggtccagcaggtacatcctacccaactcccaatgcatcctttttatccccctccagcacctcctcctgtaaccccctccctgatggccccactctttttctggaaagttgtgaacaagcctctctatctccctttcttatcaacagccggccctgccaatttcacactcaccaagtcctattgatttcaacattactgtctccatggcagccccactctgtacccctatctgtgtttttcaatagacaccatcagctcctacaatagccttcttgatgggctcctagcatccacacagcagccaggaggatcgatcttaagtgtaagtctgacccttcccctctcccctctgtaactctccatggctccccagtgccctcaagagaaagtctaaactttattttcaaaattcttcatagtctagctacttcattcttccttgctccacccctgcttctccttgttcacctagcacctgctcatctttaaatgtcatccctcagggaagcttcacctgaccctgctctacaatgctgagaaaggagtcttcctgagctaccccagctgcctgagcttccctcatcacaggctgtaaatgcctggttatgtgtctttgaattcctagagggcaagggctggatctatttcaccactgtctccagccccccagcacagcatccagtgtgagcttaataaatatttctgaatgaatgaatggtgataagaaatcgaggctttgcgaatgctactgtgtgtagcagacgctgtgggcatccctactgcacccacatttcagcacctgccaacagcatccttctgcagtcacctgggtgagggccaggctggaagtgacagagaattgatgtctcaggaagcagcccttcaccagtgatggacaggcgctggtggataaatatcccacctctctcattctcttgggaagaacaagtgcatgctatacaccatctcccaagggtatccagtgggactgagcccagttgctcagggcagtcacctgctcataagtgttggttctttccttccttgtctcacttccccactctcctggggcttcctggatcacttcccacataaacaacttacccccaaatccttgtttcaggagctacttctggggtatccaacttaagacactgtagtgaaaatgagtctataatttactggctgccgcttccagggagaactttgatgtgtttgggaaaaaaagaaaaacaattgcctctttctccctgtcagctgtagtcctcacagcctccaagcaaagactgccacatttgcagttatgtattaattgcttttatttttttttttccccgagaacgggatgctctcctgcaatatgtgtgtgagagagagagtgtgtgtgtttaataactttctcatttgagatctggccggatagctttttgaagaaagtctacccagagcctggaacgtatagaaaattctcccggcttaatagcactcccacccgcccatccatcacagacgcactgtggaatgaaaaacgagcacattgattggatctatttctaatcgacagcctgagatactgtttgaggtctgccattagacggaagaagttggtgtggaagtggctgtgtctctatttctcaagggcacggggtctggcgtgggggttgagggggacagaaataatcatggtagcatttagcaagcatttattgagtacctactgtgtgccagatcctgcaatgggtgctggtcattgagatagacccagctccaccctcccagtgggggagatgtacaggtcacttgtggcccacaatcagaaccatgatgggggagattcaggcagctctgggggcccagagaaggtgtctgacccagcctgggagatcagggagggcttcctggaggcagggacagctgagctgaaagctgaggagtcaaccaaataagaaatagggaagaagttggctaccgtggctgatgcctgtaatcccaacactttgggaggccgaggcaggatgatccctcaagctcaggagtttgagaccagcctgggcaacatagcaagaccccatctctatttaaaaaagaaataggtgtagtggtgcacacctgtggtcccagctacttgggaggctgaggtgggagaattgcttgaggccaggaagtcgaggctgtagtaagctatgattgcaccactgcactccagcctgggtgacagagcaggtccctgtctctaaaacaaaccaacagggtgggcgcggtggctcacgcctgtcatcccagcaatttgggaggccaaggtgggaggatcacctgaggtcaggagtttgagaccagcctggccaacatggtgaaaccctgtctctattaaaaatacaaaaattagctaggcatgatggcgggtgcctataatcccaggtactcgggaggctgaggcatgagaagtgcttgaacctgggaagcagaggttgcagtgagctgagattgcaccattgcactgcagccctgggcaacagagcgagactctgcttctaaataaataaataaataaataaaacaaaacaaaacaaaacaaaacaaatggggaagagtgttttcagggaggaagaacagcatgtgcgaaggcctgggagcaagtgaaggttacttagtgtggctgcagtatgcagtgggtggggaagaggaggcgtaggggagatgtggagggagaagttggcagtgctttgaggcccatgggacagggtttccacttttctggggacaatatggagccacagaaggatttagagcaggagagtgaatggcatttgctaaaaaaaaatcattttgacatagaatgatcgtatgattcaacaattccaagcagggactcacgtagatccttgtacatgcatgttcacagagcacgattcacaacagccaaaggcggaaacaacctagagtccacggatggatgaatggatgaacacagtgtggtccatccaaacagtggaatattgctcagccttaaaaagaaaagaagttatggctgggtgcggtgacacacacctgtgatccgaacactttgggaggccaaggtgggaggatctcttgagcacggaaatttgagaccagcctgggcaacatagtgaggccctgtctctataaaaaaataaaataataaaaataaaaataaaataaaaataaaaataaaaataaaaaatttatccgggcatggtggcgtgcacctgtagtcctagttacttaggaggtggagactggaggatcgcttgagcctgggaggttgaggctgcagtgagctatgatagcgccactgcaatccagtctgggtgacagagtgagacactgtttcaaaaaaagaaaaaagaaagaaatgggcttggcattgtggttcatgcctgtaatcccaccatttggggggccgaggtgggcagatcacctgaggtcaggagttcgagaccagcctggtcaaaatgatgtctctactaaaaataaaaaaaattagctgggcatggtggtgtgtgcctgtaatctcagctactcgggaggctgaggcaggagaatcccttgaacctgggaggcggcggtgtcggtgagccgagatcatgccactgcactccagc[222 bp omitted]gaggcaggagaatggcgtgaacccgggaggcggagcttgcagtgagccgagattgcgccactgcactccagcctgggtgacagagcgagactccgtctcaaaaaaaagaaaaaaaagaaaagaaaaggagttctgacatatgctacaaggtggatgaaccttgaaaacattatgctcaatgaaagaagcctactgtctacagaaggacaaatactgtatgattccacttatatgagatccctagaggaggcaaattcctggagacaggatgtagaatcaaggttgccgagggcaatggggagttatcgcttaatgcttacagggtttccttttgggctaatgaaaaatttttggaaatagtggtgatggtcgcacaacattgtgaatgtacttactgccactgaattgtacacttcaaaatggttaaaatggctagcctgggcaacataaccagaacctgtctctacaaaaaaaaaaaaaaattaaaatttgggctgggcacggttgctcacacctgtaatcccatcaccttgaaggctaaggcaagtggatcaatttgaggccggaagtttgagaccagcctggccaacatggcgaaaccccatttctgctaaaaatacaaaagatttgctgggtgtggcagcgtatgcctgtaatcccagctacttgggaagctgaggcacgagaatcacttgagcccctgaggcggaggttgcagcaagcctagatcgtgctactgcactccagcctatgcaacacagcaagactctgtctcaaaaacaaaacaaaacaaaaaaatagctgggagtggtgacacacacctgtaatcccagctactcgggaggctgaggtgggaggatcacttgagtccaggagttcaagggtgcagtgagctatgattgtaccactgcactccagcctgggtgacagagcaagactgtctctgagaaaaataaacataaaagtggttaagatggtgaattttatattatgcatattttaccacaatttttttttaaaagagagagagaaaaaaaaatgaataggccgggtgtggtggctcaggcctgtaatcccagcactttgggaggctgaggtgggtggatcgctcaaggtcaggagttcgaaaccagcctggccaacatagtaaaaccccgtctctactaaaaatacaaaaattagccatgcatggtggcaggtgcctgtaatcccagctactcaggaggctgagacaggagaattgcttgaacttgggaggcagaggttgcagtgagctgagatgacaccactgcactccagcctgcgagacagagcaagactccatctcaagaaaaaaaaaaaaaaaaggatgcaatcactttggctgctgtaggagatccaggatagagtaagtccaggaggtgctgggggttcagatcaggataagggcaaaggcgagggtgagaggtgggaggttgggggcgtggttggggtgtggcttgggcatggcttggaggcgaggctaacagggcgccagggagagatgagagtgaaatggaagatgaaagataaagcaggcagctgagttcctgcacccattctctcgacgcctaagcactccaattcacctgcaagtcttcgtggcctgacgtctccaaacccgccaccctttatggctcagcctggggtggcccctaacaaggagtcccaaatggggattgatgccacttcttcagtacaaagaaagattaaagcgacactgggtaaaaacactccatcccggccgggcgcggtggctcacgcctgtaatcccagcattttgggaggccgaggccggtggatcacctgaggtcaggagttcaagcccagcctggctaacatggtgaaaccccatctctactaaaaaatacaaaaaattagctgggcatggtggcggctactccagagggtgaggcaggagaatcgcttgaatacaggaggcggaggttgcagtgagccgagatcgtgccactgcactccagtctgggcaacagagcgagactctgtctcaaaaaaataaaaaataaaaaacaacactccatcccggcagccgttcctccacgtgcattcgcttacaaggtgcagatgtaatacctgcttttaaattcaattaagtcagaatcagttctgctcctagaatacattacccagttggagacagccgggggaagagggaaaaaaaaaaaaaaagatggcaaacaaacaaacaaaaaaaaaaccccacacacaaaacacaacgcagacctatttagagatttccctctaaatggattttaattctctcgatttatcagaggccagaggagctgctgacagcctgcatttggtgtctgcaaacccagtttcagccacagggaggggagaggagggatcgagtttatgttgtcattttcctccagtgctggaggtctggggtcgcccagagatgggttcaaatcccagctttgccatttactggctgcatgaccttcagccaagcaccgcatcctctcagagctttgacctactcatctggaaaatggagataatgacagggtttatttcagaagagccttgtgaatgatggcctggattatccaagaggattcaggttaaatcctcagcacaaggcttggcacatagtgaacgctcagtaacgcagggatgatggtgatggtgatgaaggtcgtcgttgttggtttttttgtttgttcgttttttgagacggagtctcactccgtcacctaggctggagtgcagaggcgccatcttggctcactgcaacttcggcctcccaggttcaagagattcttgtgcctcagcctcccaagcagctgggattacaggggtgcaccaccacacctggctaatttttgtatttttggtacagatgggggtttcaccatgttggctaggctggtcacaaactcctgacctcaagtgatccacctgcctaggcctcccaaagtgctgggattacaggcaggaaccgccacacccagcccactgttggtatttttttccaaccagagacccagccctgtgctaggttactgtagggaaagaaaaaagatgcatgaggctcaagtcctgcctttggaggctgggaggctttgggtaagcagggaagaaaggggtaggatggacacaggctcaggacagagaaggagccatcctgaggctacacagctcagagctgtccctttgcaggcctggatcctactcgtactgggttcagactctaccgtctgacgttgggcgagcaccccacactgggcctcagttgtaccatctgtagatggggaaggaaaagcgaagtttcctgagccaaaaggctcatctgtagggtcagatcagggggcgctgggacccccaggagggtgtttgtcttcataagagtctagcgaggccgggcacggtggctcacgcctgtagtcccagcactttgggaggctgaggcaggcagaggccgaggcaggcggaggc[137 bp omitted]tgaggcaggagaatcgcttgaacccaggaggcaaaggttgcagtaagccgagatcacaccactgcactccagcctggcgacagagcgggacactccgtctcaaaaaaaaaaaaaaaaaaaaaaaaaaaaaaaaaatgcctagtgagggggattttcacaccagaatcagaatcagaaagggttttaggacaaaaagggtcctggcctgtaatgtcccctggggagctcaggggggccatagttggctctcctaaagggttgcttcatccacagaaggcctcccttcatcccgggcccacggccctcatctgtgcctgccctgaaagggcaactggggagggtgggaggtgtcgaggacactctagtcccagaatcagggttggggggcagaggtctgacaccacggttgggaaggctaaagagaggcgcagtggcttattcctataatcccagcactttgggaggctgaggcaggtggatcaattgaggtcaggagtttgagaccagcctgggcaacatggtgaaacccagtctctactaaaaatacaaaaaattagccagccgtggtagagcttgcctgtcatcccagctactcaggagtctgaggcaggagaatcacttgaaaccgggaggcggaggttgcaatgagctgagatcgcaccactgcactccagcctgggcatcagagcgagactctgtctcaaaaaaagaaaaaagtacagttatccttgagaggatctaattgcgaggaggcaccaagggagcttctgagggttggaatgttctacgtcttgctgtggtggtagccaagggggtctatgtccatgtcacgattcctcaagctacacacaagatttgagcactttataagttatacatcattaaaaaagagggaagactcagagagg[141 bp omitted]tgaaactccgtctctactaaaaatacaaaaaaaaattagccgggtgtggtggcgggcgcctgcagtcccagctactcaggaggctgaggcaggagaatggcgtgaacctgggaggcagagcttgcagtgagccgagatcacatcactgcactccagcctgggcaagactccgtctcaaaaaaaaaaaaaaaaaaaaagaaacagagaaaagagagacaaagagataaacagaaactgagagacatagaggaaactgaaatataggaagagagagagagacagaggcagagagacaggaagagacagagagaagaaaagaaggaaaagaaggagtttcaaagcagaaaggtggggagaaatgaggaaattgggaagaagaactgaggactggagaagagaaagccaaagaagagggggggaaaggaggagaaaatagcaaatggcccaagaagtggcgggagagagtggctggggaggccaggaagccaggagctgtcacaggcgaacatgtccttaattgtaattacatgggaacatttagtttgtagatgcagcagaaatgaaaacgctgtgctttgcccattcatctaatggctgttagtcaaccactcttcaaaaagaaccccccacttctccgccccggggctgtggttgcatggggggcagcctgcggggagctgatcagaggagatggttttaaactaatgatgtcctcagggataccgagagggacagttctgggaagaatagaatttccccaccaaaaacccatggctggtgaatttctgagccctgcaaacagttaccagcccggaagtcagcagctggcgagtgggagttctaatctgcaaggctagattaggggagatacaatgtatccaagagagatcaaggttctttaactcaccctagcgggtgggggaagccttcctagaagggctgacatctaaactgtgcttaaatgtatactttgaggcaggcaagcaaaaaaggaaggaagaaaggccttccaaagagagagaacagcttgtgcaaaggttgagaaggaattacgcttacaaccatgagcgtgactgggtgggaagtggggcagggatggggatgggggtgtagctggggaagtcagcagagcccagaccacttataagacatgctgaggagatgggactttgtcctgagggcgatagggagtcatggagggttcacaacaggtgaacacagtccaggataatattttttaaaaattgggggccattcatatgatatttcacttactcaaaaagagagagcttcctggtcctggaggcatgcaaaataaggtcacactaaccacccggggtaccctgggggatttcaatatcaggtggggctgaggctgggactgcagaattggggttctcaggcaggagggcgaggtgctgagagaggtttgatgtgttactaatctcgcttggggggtacacttggccctctggctttgagacagtgaggagcagggggtgtggatgactcaggagtacagacgccagagtgggaggtttgagtcagcgcctagtgtatacctctcccagccactctcagctggaggtgactcactcattcatttggccttgaatgtagaggactggagtaggcagtgggggaaggaaaagaccacccaactatcccactactgtttacccctcctgccactgtgggtccagtcctgtgcaggaacgaccgatccacctcccccacaacccaatacttctagaatgaaatctgttggctccaaatagaccttggtcttgtcctctcctcactcctcctgtggttccagccttgacctggcaccatcgctgcttatctggatgagcagggtcacctccattctggtacctggctcccaccccgcagtctctcctccccacagcaagcagccagagagctcctatgaacctcctatgagtcagcgtccatccctcctctacccacagccctccatggcttccatctcccttggggtcaaagcccaagtccttacgaagtgctttttagccctgcactacctgccccatcccttccccaccctctgctcccctcctccctctctccccctcctcactctgctccagccacacaggcctcctcgctgttctgtcagacttagcgctgcctcgggacctttgcacgggctggttccctccacctggaactcttctcccagttttccccacagcttctttttattctccttaaacatcacctcctcaggaaagccctccttgattgctggtctaaagtaacatccaactcactctccacctcatgcccttgtttttattttcgtcatttttttttagtttgcttgtatggtcttttgaaatgacccgctgtatctgtttttccccaccagacctcaccgtggagcctgggcccaactcggtggtgccgtatccccagcaccccgtatgggcaagtgattgtgcttgttcctcgattgaatggatcttcacagcagtcctgggatgtggaggcttttatctaccccatttcacacagggaaaactgaggctcaaagacatggagccctcccccccaccacttgtgggtgcttcgaggatgtccgtggaccatgcgcgctccctggaattctgtgggaggaatgctgcggtctcgggcagctccacaaacggaggtgtgttctgagtgggggtgggtgcgtctgtccatgctgcctgggggacaatgtgtgtgtgtgtgcgcgcgcgcgcgtgcggggaggggagggggagggaagggggggaaggggtgataaaagagcccttgggaggggagctgctaatttcgctgggggaaggggaccctctcattccccttctgctcttcccacccctccccctcccccaccaagatgcccaggcgaggggaccttcctgggagggggacgacacggagtagggggcagcgtggagttgggagacagggagtaggggcgacactcttccaaagaccccctcacagccccgcagatattgcaaattccccatttcctgcactcccccctcgcttcccctcccctctcctccccttccccccttccacaggatcctccggggctggaccctgcaacccctcccgggtcccgggagctcgcgccctgctcccgcccactggacgcccgcagccaatggccgcgccgcttgatgaggtaatgcgccccctctgcgtccccattggccagcctggagcccattcccttgtcccctgcaagcagtggagacccagcggggcgcgggcggggtgttcccagggtggcacctgggtacctgcgttccccccatgcccctctctgtgaaaccccccacttgcccctccccctcttcgggcccagtagggtccaggggctggacttgggggactcctgcccccagcgacgcccagttcctcccataggagcaaaaaggacaaaagactcccccatgcctccagtagtcaaagacccccgagctgcccatcccagacactcgcgcaggtatggagcgcctactgtatgccagccccgagactcattggggatgcagcggtggcgacatcagccccgggtccctgtccccacggggctcccaggataatggggaagagaggcaggccaccagccacgtcctccccctcctagtcggtgctgcggatgaagggtgaggagggtaggcagaggcaggaggggacagccccctcttttttttttttttgagacggagtctcgctctgtcccccaggctggagtgcagtggagcaatctcagctcaccacaacctccgcctcccaggttcacaccattctcctgcctcagcctcccgagtagctgggactacaggcacctgcc[187 bp omitted]ctgtggcctccaggagactttgggggccatatctcctcatccactgctgtattcattcagcaaatatgtccttagtaccccctccccagtccactgcctcttgttttgtatatttcttcttttttctcccccttctgtccccataaccactggaattggcttttttttttttttttttgacagggtctgtcacccaggctggggtgcagttgtgtgatctcagctcactgcagcctcaaccttctaggctcaggtgatcctgccacctcagcttcccaagtagctgggactacaggtgaatgccaccacagccggctaatttttaaattttttctagaaataaggtctcgctatgtttcccaggctggtctcgaactcctggcttcaaacaatcctcctgcctcggcctcccaaagttcagaatgggctttaaaacaaaaagcctgtgtgtgttcttgaaactggtaaggttgttttgtctgcctgcgtttgttttttcttttctttttttttctttttagacggagttttgctcttgttgcccaggctggagtgcaatggcacgatctcggctcaccgcaacctctgcctcccgggttcaaatgattctcctgcctcagcctcccgagtatctgggattacaggcatgcaccaccacgcctggctaattttgtatttttagtagagatcgggtttctccatgttggtcaggctggtctcaaactcccaacctcaggtgatctgcacaccttggccctccaaagtgctgggattacaaatgtgagaaagaaacgtgcccagctgcgtttcttttctcttaactttcttattgaggtgaaacttggaaaccccaaatgcagaaatctcaagtgtacaagccaggtgaattttgacctaaacacacaggggtgcttgtcaccagcagccagatggagataaagatttagggcccccaactagtgggaggggagtaaggtgagtcttgtagcagaacaaggaattctcttttgtttgtttgtttttgatacagagtctcattctgttgttcaggctggagtacagtggcatgatctcagttcactgtaacctccacctcccaggcttaagcgattctcctgcctcagcctcccgaatagctgggattatgggcacccgccaccatgcccggctaatttttgtatttttagtagaaacaggatttcaccatgttggccaggctaatctcaaactcctgacctcaggtgatctgcccgccttggcctcccaaaatgctgggattacaggcgtgagccactgcacctggccggaattctctctttgttagcaagattgatgttgtgttcatcctggatttttttttttttttttttttttttgacagggtcttactctgtctcccaagctggagtgcagtggcatgagctcagctcactgcaacctccacctccagggttcaaacgattctcctgcatcagcttcccaagtagctgggattacaggcatccaccaccacgcctggctaatttttgcatttttagtagagacagtgtttcatcatgttg[138 bp omitted]gatacaggtgcaggtttgcaacataggtaagcatgtgccgtggtagtttgctgctaggtattaaacccagcatccattagctactcttcctaatgctctccctccctccctcttccaacaggccccagtgtgtgttgttcccctccctgtatccatgtattctcatcattattcagctcccactgttaagtgagaatgtgcagtgtttggttttttgttcctgtgttagtttgctgaggataatggcctccaacaccatccatgaccatgcaaaggacatgatctcattcctttttatggctgcatagtattccatggtgtgtgtatatgtaccacattttcttaatccagtctatcattgatgggccatctggatattttatttgcattaattttgatttttttaaaaaaatattgcagtcagctgtgcacagtggctcatgcctataatcctatcattttgggaggctgaggcaggaggatcgcttgagcccacaagttagaggccaacctgaacaacatagcaagaccccatctctacaaaaaatgaaataaattaaccaggcatggtggcgcatgcctgtgatctcagctattcaggaagctgaggtgggaggatcacttgagcccaggagatgcagcctgcagtgagccgtggttgtgccactgcactccagcctgggcaacagaacaagacccgatctgtttaaaaaaaaaaaaaaaaagagcgaggcgggtggatcgtttggggtcaggagttcgaaaccagcctggccaacatggtgaaactccatctctactaaaaatacaaaaattagccagtcatggtggcacacaccagtaatcccagctacttgggaagctgaggcaggagaattgcttgaacccgggaggccgaggttgcggttagccaagatcgtgccactgcactccagcctgggtgacagagcaagactccaccaaaaaataaattaatttaaaaaaataaagaagagagagagagagaaggagggaaggaagggagggagggaaaaaggaagaaagaaagaaaggaatgaaaggaaagaaagaaagagaaggaaggaagagaaaggaagaaagagaaaaagaaagaacaaaagaaaaggaaagaaagaaaagaaagagaaaaagaaaaaagaaaggaaagaaagagaaagaaagaaaggaagaaagaaaagaaagcaagcaagcagaaaaaaaagaaaaaagaaaagaaaagaaaagaaaaaggtcgggcacagtagctcaggcctgtaatcccagcactttgggaggccaaggcagtggatcacctgaggtcaggagtttgagaccagccagaacaatatgacaaaactccgtctctactaaaaatgcaaaaattagctgagcatggtggcgtgtgcctgtaatcccagctactcaggaggctgaggcaggaaaattgcttgaactcaggaggtgaaggttgcagtgagctgagatcacaccactgtactccagcctgggtgacagagcgagactccatctcaaaaagaaaagaggagagaagagaattgaagaaaagagaattgaagagacaaaaattgaagagatgagaattaagagaagagaaagagagagaagagaagaagagaagatgcagtcagatgctatttagcttgattgctgagtttttgttgctgttgttgagttttttggtcctcccttaaagtttgctcctgaggagaatccctccaccacctcaccctagccctgccctggggaagagcattctagcacccaaaagatctctcagacccctgtcatgaactgcccctctcctcccaggtgcatcttcctactctccatcaccactgtttcctttgcctatttttaaaactgatgttttgaatctggcatcttccactcagcatagttgcattggagattcatccaagctggtgcgtctctccatagtccaaccctttttattgctgagtcgtattccagcgcctgggtggaccgcagtctgtttaccgagccccgagccaccagcggataggcatttgggtttgtatcctgtgtttggctgtcacgaagaaagctgctacgaacatcctcgcacatgtctccgggtggacatatgcttctgtttctctcggggaaacacctagcagtgggtgcctgggtcgtatggtaggtgtctgtttaactttttaaggaactgccaaaccgtttcctagagtggctgtaccattttgcattccctccagcagtggaggagcgcacccgtgagtgcgtatttttggcattcttttttttttttttttttttttagacggagtcttgctctgtcgcccaggctggagtacagtggcacgatctcggctcactgcaagctccgcctcccgggttcacaccattctcctgcctcagcctcccgagtagctgagactacaggcacccgccaccacgcctggctaattttttgtattttttagtacacatggggtttcaccgtgttaaccaggatggtctcgatctcctgacttcgtgatccaccctccttggcctcccaaagtgctgggattacaggcatgagccaccgcgcccggcctttcttggcattcttgtatcttccctttggatcagctttatggaggtgtaatttaaggatacagttcgatgaactttgacaaatgtatacacctgtgtagccactacctccttccagatgtacaacatttttatcaccccaggaagctccctcaggacatgtgttgttattttatttatttgtttatttatttatttattttggggatggagtcttgctctgtcgcccaggctggaggacagtggcgcagtctcggctcactgcaacctccacctcctgggttcaagcgattctcctgcctcagccctctgagtagctgggattacaggcatgtgccaccacatccggctaactttttttgtatttttaatagagactctgtctgggagacagagtgaaactccatctg[137 bp omitted]tatgaatattcccattctttttttcttttctttttttttcttttctttttttttttgagacggagtcttactctggcgcccaggctggagtgcagtggcgccatctcggctcactgcaagctccgcctcccggattcacaccattctcctgcctcagcatcccgagtagctgggactacaggcgcccaccaccacgcc[181 bp omitted]gagttaccccgggccctgctgggagtgttaaataatctatgctgagtgcatcttatcagcatcctaaaatctggaacattctagagttctgaaatgcatctggcccaagggtttcaggtgagctcaattattatttatggggcctactgtgtgcataaattcttttttttttttttgagacagggtcactctgttgcccaggctggagtgcagtggtgcaatctcggctcactgcaatctccacctcccaggctcaagcaattctcatccctcagcctcccaagtagctggaattatagacttgtgccaccatgcccagctaacttttgtatttttttttttagtagagacggggtttcaccatgttgcccaggctgggcttgaacttctggcctcaagtgatctgccctcttcagattcccgaagtgctgagattacaggcatgagccaccacgcccagccaaattcttctaagcactggtgattagaacagacctggcccttacgggttcacagtccagcgagggaagaaggacacagggcatcatgtttacagcactgggtgtttacagcatcagggccatgatgggggagtcacaggcacggtggggcccagagggagcacctgactcaggctggggcatcagggaggcttcctggaggaagtgatgcctgagcaaagacctgaaggataagaaaggggtagcgatgaggtcaggagtttgagaccagcctgatccacaaggtgaaaccctgtctctactaaaaatacaaaaattagctgggtgtggtggcaggcacctgtaatctcagctactcaggaggctgaggagggaggatcacttgaacccgggaggcagaggttgtagtgagctgagatcatgccactgcactccagcctgggtgacaaagtgagactccatcagaaagaaggaaaaggaggggaagggagaggagagaaggggagaggaggggaggggaggggaggggctccaggcagcaagtatagcttgtgcaaaggccctgaggtgcttggagggcctgacatctgcccctcggggcttcaagttatcctggtaggtggaagaacacagatgtccacattggctttgtaacctacctggtgaggcccagagccctcctctgaccccagggctcgattgagtctttgcagccagcgggtatccagggggcaatcactgatctcgtctcccctgaggtttgctgggggcttgaccctgcagccatcaggatcccctccctcaaacttcaccctcatccttgatgctggggtgggggcaggggagacaggtcggggaggtctcactccagacagacacactccctgggccttggcagctggctcatctgaggctgaagaatttgctctttgaaaaaggcttcgctctgtggaaatctgacatctttgtggatcaattgtccctttcttctgcttcccaggcttgaaactctgttctttccctcccccagtcccctccatataatctatcagccattccaacacctctgcctgcagagtctatcccagatccacccacttctccccgctcctgtgtctccctcttggtccagccccatcactgccctcccggagcaggtgaggcacctccaccctggcccctgccacccccatccccacagtcctctctgaagcagcaagagggcgcaggtgagaacctgaatcaggtcccgtccctcctctgcctatagccctccatggctcccatcttcctctgggtcaaagcccaagtcctcactgaagcccacaaggccctgcatgacctaccctgtccctgccctgccctccccctcctccctgtctcccccttgctccctctgctgcagccacatgggcctcccggctgttcctccaatacaccaagtgcagtcctacctcagggcctttacatgggctgaaatgctcttcccccagctgcaataactt[133 bp omitted]aaaacccccgtctctactaaaaacacaaaaaattagacgggcgtggtggcatgggcctgtaatcccaactagtcaggaggctgaggcaggagaactgcttgaactcaggaggcaggggttgcagtgagctgagtttatgccactgtgctccagcctgggcaacagagcgagactccatcaaaaaaaaaaaaaaaaagaaaagaaaggaaggaaggaaggaaggaaggaaggaaggaaggaaggaaaacattatgtcaaggatgtgagtttcaagaaggcagtgactccagcaccatgcctggcacatagtaggtgctcaataaagattccttctacaatggaaggattagtcatgaaccctcaggaaaaaaaaaaatagctttgtgttcccaagtcctgcctggaagcatctggctgtggacgccaatagagatattagggggagaaaaaaaaaagggtccaaattttggttgcctcctcctgcctttaattattttgtcgacaaggctcacaattcagtaagtcaaggtggcatttgagagggacggttccctttagcgtagctgacagctaatttgtgggaagtttaattacaggcagcgttaattaactggcagagtactgggcaaggaaggcagccatctgttcctaaaaacgtcctcccctcctgggcctggctgggaggctgtgaggggtgggctagaaagaagacagggtgaagaggcggggacagaggaggagggaggagggaggaccaggtgatgaatcacggccttcttcacactgtcagggctgagatctttggcagccagcctcctccagtggcctctgggagtggcagtaacagtttctgggaatctgtctctcattggttgtatcacgaggagcagagggtgtgggacagaggaggtgaagagcccactattcttagcccatattagagagggttggcacctaccaaaggaggttgggagaaggaactgggacagagccaggggtgaaggacacactcagcagtcttggcctaagagggacagatcactctgtccctgttccacaatgagctccttcattctgaccattcttcatggggatggtacagaaatagcaacagcctctggaggtgggtgctttttttttttcttttataaagacagagtctcgctctgtcacccaggctggagtgcaatggtgcaatcatagctcactacagcctcaactccccgggctcaagcaacaatcctctggcctcagcctcccaagtagctgggactacaggtgcacgtcaccacacccggctaattgttaaattattcgtagagatgagggtctctctgtgttgcccaggctggtctcaaactcccgggttcaagtgtttctcccacctcagcgtcccaaaaccaagattacgaagccgagtttgggattacaggcacgaccccctgacttacagagatgggcttttgaaattgaatcttagctttgtccctgctgtttgccctggggcaagtcacttaacctctctgggttcagtttcctcatctggaaaatgggtttgattagaacagaacctattgctatttgtctgtcttttttttttttttttttttttttttttgacacagaacttcactttgttgcccaggctggagtgcagtggcacaatctcagctcactgcaacctccgcctcccaggttcatgcaagtctcatgtctcagcctcctaagtaactgggattacaggcgcctgctgccacaccctgctgattttttgtattttagtagagacggggtttcaccatgttgcccaggctgatctcgtactcctgagctcaggcagtctgcccatctcagcctcccaaagtgctaggattacaggcgtgagccaccatgcccggcctgtcatttatctttctagactaattaagcccaagtattttcaggctactgaagagatctctgttattacgagaactgtgtatgtgtattcaaaggtgcaaagtgttcaataaggttgagaactcctgtgccttctgcaactctgggccctcgcatatgctgttccttccacctggaacacccttcccacccctgcccagtggcttcggttttacttatgagccttgacgtggaagcctcctccctgggaagccttcccgggcccgccaggctggggcaagtgcctctctggttgcccgcaggatctgcgtgtcctccatcacagccctaatcaccctgtccccgcctggtcacactccgacttccccactggactggaagccccaggcaggcagggactgggtgcccagcacaggcctgaagaagtaggtagtcagtgcttgtgtggacaaacagcgagagctatgacccatacattgcaaggtagaggccagtggaattcaaagtcagagccgtttaaaaatgggccaggccaggtgcagtggctcacacctgtaattccagcactttgggaggccgaggcaggaggaacacttgaggttaggagttcaagagcagcctggccaagatggtgaaaccctgtctctactaaatacacaaaaaattagccgggcaagatggcgggtgcctgtaatcccagctacttgggaggctgaggcaagagaatcacttgaacctgggaggtggaggttgtagtgagccgagatggcgccactgcactccagcctgggtgacagagcgagactctgtgtcaaaaaagaaaaaaaaaagatggaactgctgttcttgaacatttcaagccaagccactaggagggacccctcagagctctgatatcctcacacagtcagggcagtcctggggtcggggagtcctcagaaataagttcaaatcctggctctaccactgctctgctgtgcaaccttggcaagtcgctttccctctctgggctcggttttctcagctgtcattcggatgtgcctcgtttctggcccctccacatctcagccgagggctctgcctccagaactggcccactttcactcgtccacgcccacccatcggctcctgcctggatcaagaccgtcacttcctccctctccacacctctccacccgtcactctccgcatcaaacgaagcctttaaaagcattaatcagctccctgtggcaaaaggcttgaactgccacttcaccaaagaagacacacagatggcaaaaaaaaaaaaaaaaaagcacgtgcaaagatgctcaatgccattagtcattggagaaatgcaaatccaaaccacagtgagatatcacttcacacttgctaaaatggctaaaattctttcagctgacaataccaagagcgggtgaggatggcgagcatccgaagctctcctacgctgcccatgggaaggcaaaacggtgcaaccccttaactccttatgaagttagacatacatgcaccaaaccccccacagcaatcccactccagggaactcccccaagagagatggaaacacacgtccgtgcaaaaacccgtacctggcagtttctaacagctctattcctaatctccccaaactggaagcgatccagcaggtgtgtttgcataaacacaccgggtcacctccacgcagcggagtgctattcggcagtcataaggaaacagcacccgagacacgcaacaatgtgggtgatattcaaatgcattctgcagagcgaaagacgccagacacaaaaggccgcccgctgtatgctcccatttataatgatgttctggaaattgctctgggaacccccgggtgtgtcttctcctccaggaaaaggctaggggcagagactagggtgtgtgtgtgtttgttggggggggcggggggaggtggaggtgggagttggttgggacggagtcttgctctgttgcccaggcttgagtgcagtggcgtgatctcggctcactgcaacctccgtctcctgggttcaagcgattctcctgcctcagcctcccgagtagctgggattacaggcacctgccaccacgcccagctaatttttgtgtttttagtagagtggggtttcaccatattggccaggctggtcttgaactcctgacctcaggtgatccacctgccttgacctcccagagtgctgggagtacaggcatgagccaccgcgcccagcctgttttttgtttgttgagacagggtcttgctctgttgcccaggctggagtgcaatggtgtgatcgtggctcactgcagcctcaaccttctgggctcaagcagtcctcctgcctcagcctctcaagtagctatgaccacaggtgcacaccaccatgcctggtttgtttttgtttttgtttttgttttgttttttgtttttatttttgttttgtttttgtagagacgggtctcaccatgttgcccaagctggtttcaaactcctggactcaagcgatcctcccacctcagcctctcaaagtgctggggttacaggcgtgagccaccatgcctggccaagacaggttttgtccactgaagcattcctggtagaggacaaagggacataaggaaacattttagggagatgggactgttctgtatcttgatagtggtggggttacgtgattgtgcatttgtcaaaattcatagacctgtagactaaacattaatgaccacttctcctctgctcccagacgcagtctcctctggctacactgcccattttgacgtttcctgcctgaggacctctgcatttgctgttccctctgcctggaatgctgttccccatatctcccttcatgtctttctgtggttgaatctttccaatctattttttttttttttttttttgagttggagttttgctctgtcgccaggctggagtgcaatggagcaatctcagcttactgcaacctccacccacctcccaggttcaagcgattcttctgcctcagccccccaagtagctgagaccacaggtacatgccaccatgtccggctaattttttgtatgtttagtagagacggggttt[142 bp omitted]tcctcagggaggccctccctgatcactcctaactaaattcaccacccccctccataacccgctattccatcaccatgttgcactaaaaaacaaaaacaaaaacaaaaaaactgcaattcattagataataaattccctgagagtggggtctctcttggtcacagcagtgtccccagcacagcactagcggatagcaggtgctcattaaatatggatcaagaggcaggagtttgagatcagcctgcgcaacatgaaaaaacccactacaaaaattagccaggcatagtggcgcatgcctgtaatcccagctgattaggaggctgaggtaggagaatcgcttgaacccgggaggtggagattgtggtgagccgagactgcaccactgcactccagcctgggcaacagagcaagactatgtctcaaaaaaaaaaaaaaaaagagagagagagagagacagtcgagtgaaagagcaaagcacacagggctctgtgaacccgggtttgaattcaggcttggcccctggtatgctgtgtggcttcaggtaaatcgaatcacctctctgttcctcatctggaaggtggaattaacatgcctctcttgcaggagtgtggggaggtttaatccagcaggcaccagccctgagctccctgagtcctcctgtgggcaaaagccccagtcctcatttgcagatgccctggaacctacctagcctcgcccagccagggtgcagcctcagggaatgcttgctgaatggcagaatagacaaatcagtgacaacacaagcaaatgccttttcctggtaattaagttcacttggtaattaagtcctcaaacatcccagccctccctcatcttagccctaaggacttattttgcaattctccaaaatgctcagaatcaactgcaccgcccgtcccttcacacggactgtgaaccaggcatcgcctggtgtgctctttcccccaacttccacttttcttgccaagttcctacttgtccttcaagtccacttgaaatctcccctcctccaggaagcctgccctgaaccccattatctgggctccctcagccctggctgtctgggtccatctcttacccaagcctggggctccttgagggctgggcaggggctggagaactcttggagtccgctgtgtttcccagcgcagatgtgggcacccagtggggaaccctaaatactcagtgagtgcattcatggggccagggttcaaatcccagctcagtcactttgcggctttgtagtcctagtgagtctggtcccctgtcacagactcagtttcccccctctagaagatggggtgtccacaggaacctggccctggatgcagggggtcagcggagtttcccgcaaggcacggtcacaggctgcaggctgcattgctcagtggcagtgctggtggctcctgccatccccgagtgcccccctcctctggggctcagtttccccatttggccacactcccccttagacaaacacagacggggcgccacctggctgggcaggagggggcctcggcagcttctcacgaagaacagcagccaaggtgggggctggcggggctggcacaggccggcctcgttaagctgccagtccttggcaccactctgctttcgtggaggcgtctggagaagggcccaggcctggctgttgggggactgaggaagctgggatgaagctgagaccctttttcagagggggcaggccctgagtgatggcaaggagttctatgttcacttattaagcatctactggatgccagaccaggctactcaggcagggcgtttgcccgtgctgttctagctgccaggatcgcgtttcctgttcatagcactatccactgctcattctgatctcagtctagaagacaccacctccaggaagccttctagattctctagaataagccaggtgcggccggg[175 bp omitted]gaggcaggagaatgccgtgaacctgggaggcagagcttgcagggagctgagatggtgccactgcactccagcctgggcgacacagcgagactccgtctcaaaaaaaaaaaaaaaaaaaagaataagccaggtgcctccctttgggttggcacggtgcctgagttttccccatcacagtttgatcactcaatattttatttttagaggtggggtcttgctctgtggcccgctgctggagtgccacagcatgatcagagctcactgcagcctcaaactcccaggctcaagcgatgttcccgcttcagcctcccgagtagctgtgatcacccaatattataactgggctgtgggcaggtcacttaggccatcaacaaatgcaaacagagcacttcgtacgtggtaggcactatgcttagcaccgtccatgctcagcgaaccccgcagtgcaggtgctgatgctgcctcctctttacagaaggggcaactgaggctcacagtggctgaatggtggagtgaagccacatggcctggagtctggtgcacagaagggcccgggaaaagctcatttccatccccagggacagtgagctcactcaccactgaaggaggcctaagctggaggtgtggggattcattcattcaacaaatatgtattgggcagccattgaaggccaggttactcaagtgtgtccgagtgacaggtggtgttggacgcctccaacatctgttgtcttgtcctccatagtaatagaagccctggttttcagctgcacagttggccattcagaataaatactacatttcccagcaagctttctgccaggcatggccacgtgactaattctggccaatgcagtgtgagcagaagtggtgcctgggatttccaagaagtgtccttaaagggacagggtgagctcttcctcactctttcctcctcattgcctgggaggcagatgtgatggctggagctcacgcacctgccttgtcccacgaggaggaggccatttactgaggatatggtggatggaaggagtctgggctgcagacaccccagcatctccatgccatcccaggaatgactactcacattccacattcagaagcaaatcagccctgtacgcctacaccgctgtggttgggtcttgcttaccacagccaacccgagcctgaccgctacatttgtccctctctgcttctgtttttccactcttgcctcctctcatgcctgctggactgaaaaacctgcctctgcttggtagcactgggctgcaagggccatccacagtggccaaggcagtggcctctagatagtgtggcctccgtctgtggcagtagacagagcaggggcaggagtgccaccaggggccgggcatggtggctcacaaatgtaaccccagcactttgggaggctgagactggcagatcacttgaggtcaggagttcgagacaagcctgggcaacctagcaaaacccccgtttctattaagatacaaaaattagccgggcatggcagcatgtgctcgtggcctcaactgatctgcccgcctcgggctcctaaagtgctaggattacggacatgagccaccatgcccggccttttctccctttcttagaaggaaaacctctgcaaagatcttatttccaaataaggtccattcacaggggttggtcagaaccaggggttaggggttcaacatctctatttggggcccacccactacatggtacaagagatttgtgtgggaggtgatctcagaagctgtgggaggggagagaagtgggtggggaagggaaggagacagtagcgggctcattgacaagacagtactgggttcgttgacttatggagctcattcgactggggacctctaggagatatggtagaacatacttcgatttgtcccataagagggacgagggagtgggggcatttatctaccacctcccatctgtcactggctgagggctgctctgagaggtattaggccaacacagaaaatctaaagactaagtagtcagcctggcaaagtgaagttgaggagcaagaattctgttccaggcagagggaacagcatttgcaaaattctagaggtgaacaaagcaagatgcctctgggacattgcaaatcatccaggcttcagagattggcaggcgcccaaccacaggggtgcatgtaggccacagagaagagtgtgggctttatctggagggcaatggggagccatgggagagtttagagcatgggaaagactatgttacaggtctggaagctgaggcccagagaggctaaggaatttagctgatgtcatacagcttatgaatggcagagacagaaatccgacttgagtgggctgcagacagattgagggtgtgaaatttgggggatggggactggggaggaggtgaggctgatgcccagggctgaagctcaggcagggggcacagttggagacccagctggagaggcaatgctatagggagagagaatgaagctggtgcaagcctggaggccaacctggcggtgcggacttgggaccactgacccccaccagccccaccctgaccctggcacttgactctccctccaaatcaagtccaggagggctctgaggatatatggactcagacctgagtccggataaaagagccagctacggagagaaagggctttccaggcaggaggcccagcccatgcaaaggccctggggcaggatcctgcctggtgtgttggaggaacagcaaggagatctgtgtggctggagcagagtgagggatggtgacagggggtcaggaatttgggttttaagcactgatctcattgtaggggggcgtggcttgaacaagtctgggtcactcttggagtctcagacaagggtaacattgaaccttctacagtgtgttgctaggaacctccagaagctgatgctggtagcgtcttcgcacagtgagggctgaatctgcactgctgggggccggcagcccttttgaagcatccctgggcctccttgggtccaaagataccctgagccttcaagaagttatctcaaagcttgcccgggtaccggcaaatcacagacctaggaatgatccattggccacaggcccaggcagctggcagctcctgggacagaatgtagcagggcgatgtcacagaagctgggggcatctagaaccctggtgactcctggtctccatgtcatctgccagaaaggccacctgcgccagcacctcctgagaccggccttcaaagacacgacgcatgccgctctgccgtccggagcacttaatgcctagagccagcagggtcccagtggccgcgtcactgcctctgagccacgcggtcattccaactcaactgccctcgcgtcctggccacaggccccctgggagaccccggagatgcccaaaggcctcatgcctgccgcctccagtgggacctagcagcacacagacagcgaagcgggtgaccatggggtggccacggccgggccgagccctcgtggcagtcaaagccttgctggtcttgtcgctgctccaggtgcccgcgcaggcagtggtacgggccgtgctggaagacaactcgagctcggtggactttgcggatctgccggcgctgttcggcgtccccctggcccccgagggcatacggggctacctgatggaggtcaagccagccaacgcgtgccatcccatcgaggccccgcgactgggcaaccgctctctgggcgccatcgtgctgatccgccgctacgactgcaccttcgacctcaaggtgctgaacgcccagcgcgccggcttcgaggcggccatcgtgcacaacgtccactccgacgacctcgtgagcatgacccacgtctacgaggacttgaggggccagatcgccatcccctcagtgttcgtgagcgaggccgcctcgcaggacctgcgggtcatcctgggctgcaacaagtcggcccacgcgctgctcctgcccgacgacccaccgtgccacgacctgggctgtcaccccgtgctgaccgtgtcctgggtgctgggctgtaccctggccctggtcgtatcagccttctttgtcctgaaccacctgtggctctgggcccaggcctgctgcagccacagacggccggtgaagacgtctacctgccagaaggcccaggtccgcaccttcacgtggcacaacgacctgtgtgccatctgcctggatgagtatgaggagggcgaccaactcaagatcctgccctgctcccacacctaccactgcaaatgcattgacccctggttctcccaagccccccggcgctcctgccccgtgtgcaaacagtcggtggccgccacagaagacagctttgactccaccacctacagcttcagggacgaggacccctccctaccgggccaccggccccccatctgggccattcaagtccagctacgctcccggaggctggagctgctgggccgcgccagtccccactgccactgcagcaccacgtccctggaggcagagtataccactgtctcctcagcccctcctgaggcccctggtcagtaaagatctagggcagggaggggggtgcaatgaggaatgtttctggtctgaaaagaataaagtgggtttgaaagcggattctcagcctcgctgctgttgggccacccgcctctgactggggttgggggacacccatccccatcaagcctaaggccaatccccgtttctgcgggcgggagagcgaggggtggtgagggctggggggcctttttggggcggctgtgaccgtggtgccggagtggctttgagacgggtcgtctgtgctttggttccagtcccgggcacacgggtcactcatcctggatggccttattcttcattcacattttttcttttaaaataaacgttttattttggaactggtttagatttccagaaaagttgcaaaggtgccatagagttctccaaccccttttactccgtttcctcttatgtctcatgggatcccaggtgtgatgggatgggaggccgaggtgggaggttcgctcaaggttagaggtttgagaccagcctgggcaacataacaagaccccacctctacaaaaaaattttcttaggccgggcgtagtggcttacgcctgtaatcccagcactttaagaagccaaggcgggcggatcatgaggtcaggagatcaagaccatcctggccaacatggtgaaaccctgtctctactaaaaactacaaaaatgagctgggcgtggtggtgcgtgcctgtagtcccagctgctcgctactcaggaggctgaggcaggagaattgcttgaacccaggaggtggaggttgcagtgagttgagatcacgccactgcactccagcctagcgacagtgaggctccgtctcaaaaaagaaaaaaaaattcattagccaagtgtggtgatacatgcctgtagttccagctacttgggaggctgaggtgggaggattgctggagcctgggaggtgagctatgatcacaccactgcacttcagctcgggcaacagagtgagaccctgtctcaaaaaaaaaaaaaaaaaatgcaaggaggcaagggagttttctgggcagtgagggggctgtttgaccatgctccgacgagaaatagctactaggtgaggtcataggagcaaaagggtcaaggtcgcctctgagacattccctggaacagtgtgaatgtgagagtcacgtgcaagattccgactgaagcccaagcaacctccagagagcgcccactctgtgccagacgcggttccaggcacacagacacagcagtgaacaaaacaggggaaagtccctgctctccagggactgctattccagggtgggggatagatacaaagtatataattaaataaatgagcagggagatgtcagcacgagataaatcctggggctaaaacacaagggggtcatgagatggagagagcttggcggatgatcagggagatcacggaggaaacatgagaaccgagactcagggccgggcacagtggctcacgcctgcactcccagcacttcgggagtctgaggttagcaaatcgcttgagtctaggagttcgagaccagcctgggcaacatagtgaaactccatctctccaaaaaaatacaaaaattagcggggtatggtggtgcacacctatagtcccagctactcaggaggctgagacgggaggatcacctgagcccaggagctcaaagctgcagtgagctatgattgcaccactgcactccaacctgggtgacagagtgagaccctgtctcaacaaaaacaaaaacaaaaaacacaaactgagactgaaaggggaggaaggaggcgttagtgcaggaaggatattccaggcagagtgtacagcccatgcaaaggccctgcgacaggactgcacctgacatgttggaggaacagccagaagcccatatggcagcagcagagtgagtcagaggggagagggaggagcgtgggaaggggatagggcaggtcgtgcaggccctcgtagagcttagtaaggaacagattttgggccaggtgtggtggctcacgcctgtaatcccagtactttgggaggccgaggcgggcagatcacgaggtcaggagatcaggattatcctggccaacacggtgaaaccccatctgtattaaaaatacaaaaaattagccaggcgtggtagcgtgcacctgtaaccccgggtactcgggaggctgaggcaggagaatcgcttgaacctgggaggcggaggttgcagtgagctgagatcgcgccactgcactccagcctggggacacagagacactccgtctcaaaaaaaaaaaaagaaaaaagaa[141 bp omitted]cgacaccccatttctactaaaaatacaaacattagctaggcatggtagtgcgtgcctgtaatcccagctactcgggaggctgaggcagagaatcacttgaatctgggaagcagaagttacagtgagccaagatcacgccactgcactccagcctgggtgaccgagggagactctgtctcagtaaaacaaaggaaagaaaagaaaagaaaagaagagacacagagacaaagacacagggaagacagccacgtgacaacgaaggtagagattggaatgatgcagccacaaacttgttacctcctctttttatgaagacaccagtcatactggattagggtccatcttaatgacctcatcttaacttgattacgtctgcaaagatcctatttccaaatacggtcgcattcccagatatcagaggtcaggacttcagcatattttttgagaggatgcaattcaacccataacataggggtgagagggaaggaggcccagctttggggaattgccagacctggatttgaagctggctttgctgtttctggctttctttgagatgatgggcatggccatttctctctctgatctctactttatggatatggaaaatggacatcctaacagcacgtacctcatattgttcctgggagattttaaagaggtacttcatgcaaatacaattttttttttttttttgagactgagcctcgtcgcccagggtggagtgcagtggcatgatcttggctcactgcaacctccacctcccaagttcaagtgattcttctgcctcagcctcccaagtagctgggattacaggcatgtaccaccacacctggttaatttttgtgtttttggtagagacgtggtttcaccatattcgctaggctggtctcgaactcctgacctcaagtgatcctcccgccatggcctccaaaaatgcgaggattacaggtgtgagccactgcgcccagccggcaaatacaaaatttaatgtgcttcctccacctctttgattgccacagtgctgggtctcacttccacacctttgcacaggcagttttctctgcccagagtgccctccacatgcctcgctcagcctagctcaacattaccattccttcagtcccttgcacacatctacaaaaaggatcccaaatacgagagtcaagagtcctgggtttaggccaggcacggtggctcacacctgtaatcctagcactttgggaagccacggcaggaagatttcttgagcccaggagttcaagaccagcctgggcaacatagcgagatcccatctctacaaataaatttttaaaaattagccaggcctggtagtgcctgactgtagtcccagccacttgggaggctgaggcaggaggatcacctgagcccaggaggtcaaggctgcagtgagctatgatcacaccactgcattccagcttagcttgggtgacacagacaatctcaaaaaaaaaaaaaaaaagtcctaggttcaaattcccagccctgctacttactgtgaagccccctgagaatgccactaccccctcagagtcttgacttgctcctctgtaaatgaggataacagtgctagctacctatggcagacatgtatttggggccagcagcacggtgcagctgtgggaaactacctgtcttccattctgagtacacgtggctgcaaggagtggggagaagagaccttcttccagattctgggtagtcacatgacccaggcctagccaatgaaaggattgcaccctctaagccacagtgattggttcaggatgggacatgtgatccaagctgggccaatgagagccagccctgggatttgtccaagaaggatcaaaaagaagactcttctggagaggcactggtgcacgtctgtaatcccagcactttgggaggcctaggtggctggaacacttgacatcaggagtccaagaccagcctgggcaacatggtgaaaccctcatctctactaaaaatacaaaaattagctgggcgtggtggtggacgcctgtaatcccagctacctaggaggctaaggcaagataatcacttcaacccaggaggtggaggttgcagtgagccgaggtgcccatcacttacttctcctctgtattagttcattctcacgctgctatgaagaaatacctgagactgggtaatttataaaggaaagaggtttaattgactcacagttctgcatggctggggaggcctcaggaaacttataatcatggcagaaggggaagcaaacgcgtccttcttcacatggtggcaggagagagaagtgaagaggaggaagctctttataaaaccagctgatctcatgagaactcactcactctcacaagaacagcatgggggaaatgcccccatgatctaatcacatcctatggggtcccttgcccaacatgtggggattacaattcagattacaattcaagatgagatttgggtggggacacagagccatccagaccatatcaccccctcagcatctcagcttcctcagctgtcaaatgacagtgactcaaggcagagaccacatacgttttctgcacatagttgcccatgagccctcctatcaccatttgagcttgggggatgtgatgttccccgtttctcccaggaggaagctggcatacagacaggggaccacccctgcccaagtgccacagctaaggagaagctgcaccaggcctcagcatccgcccttccccacgcctggctccccaaacctcctgcctcactggctgtgtcccagcttggcccctgccaggccagatgtccggctgcaaattaaacagatttgctgtccgaaatcagactgcttcttttgtcttttctcccgtcctgctccaaggtctcaggttttatgccaggatagctaaactctcagagacagaaaacattgctgggatggaagatctgtctgtacagggtgatatgtcttgggttggcacatgctacactgccttgtccagcagcccacattctgcctggggctcctggtgactaggggttggaagaagagagagaaacccatgggtggaacacattggtggggatcagacattattgcactgtaccttttcatggacaggcagagaaatgtagcccagagagaggcgggcccagcacatgctcatccagtgtgttggggacaaagacaagattcaaattcatgtcacctgactccggtgggctggcacttccctaagtcttgtctgggtagctcatgagtcaacaaataattggcgcggccaggccaattgagtgagacccagcatggtgtctcactcctgtaatcccagaactttgggaggctgaggcaagaggatcacttgagcccagaagtttgagaccagcctgggcaacatatctagaccgtgtctctagcaaaaaaaaacgaacaaaaaaattaaccaggtgtggtggtgcatgcctgtagtaccagctacttgggaggctgagatgggagggtcacttgagcccaggagttcgaggctgcagtgagctgagattgtgccactgcactccagcctgagcaacagagtgagaacctatctcaaaaacaacaccaccaaaaaaaaccccaaaaaacaaaaataaaaaccagacacacagccttggggacctgtcctcgcacaccactccactcccactactcccacactctgcgctgggtttagattttcttcactggggtgttttgctgatcagcttttaattttactatagtgaaatcggccaattcgttttcttttaggattcttgctccctgtgtccaaagaaacctttgcctaccctgaagccacaaaaatattgtttttattctcctctaaaatttttgtaattcaagctttcatgtttcatctatgatgcatcttgaattgatttttgtgtatggtgtgaggtaagggttagggttctttatttccccacacaggtagccagttgttccagaggcttttgttgaaaatacttgccttttgtcactggatcatctaaaagcaaatgaccatgtatgtatatgttgggggggggggatgtctttttctgtgttctctattctgtttcatggatctatttgtcaatccttatgccaatacccttgccttgtttactgtagctttattagacatagacttcctttcttcttttccttctccttctttcttcttcttcttcttcttcttcttcttcttcttcttcctcttcctcttcttcttcttcctcttcttcttcctcttctttagacagagtcttgctctgttgcccaggccagagtgcaatgacacaatcacagctcactgcaaccttgacctcctgggctcaagtgatcctcccacctcagcctcccaagtagctgggactacaagcatgtgccagaacgactggataatttatttattttttgtagtgatgggatcttgctatgttgcccagactggtctcaaactcctggcctcaagcaatcctcctgcctcgacctcccaaattgctgggattgcaggcatgagccactgtgcccagcctggacatagatttcaaagagcaagatccatgtggtatcagctccatatacagacttccagcaggaccaagggagctgttgggagatggaagcactggtgttttctccagggattcatccatggatgagcattcctctaaagtagcatctcatagcatctttgctcctagaacacacttcattcttgagctgacacccaatcatacttcctgagcacctgggatttgttgattggtgtcatctcatttgtttattcatcacaaatttgctaagcaccttctacgtgccagagcctgtgttgggcactgggacacaaaactgaccacaacaaacccagcccccaccttcgcaaattctgtccagtggaggaggcaaatattgaactatgtttgaacaactgaacaagaatgtttcaaacagtggtgagtcccaggagagaaataaggagataagataaagcgtgtgagaggcaggatcaatcaaagaatgctagaattactgggtgaaagttgagggagaaagaggatatttgcccagtctcaaagtaactctctcatgatatttattcactggaaaagaataaagataactttctggggggaaatctagctggtaccaccttagccaagggatcaaaattaatgcccccagcaacaagacacattgacagtgtgtgcctcctgatctgctgttctgaggggaccacagcaccatctcagtgggatctggacagaaatgcagaatccccatctaatcatgattagacactagaaaagcctgaattgagtgaccttctgtaaaacacctggccagtgctcttcaaaagagtcaaggttgactgggcatggtggctcatgcctgtaatcctagcacttttggaggccaaggcaggaggattgcttgagaccaagagttggagaccagcctggacaacatagtgagacaccatctctacaaagaaaaaattaaaattagctgggtgtggcc[141 bp omitted]gtggtggcatgcacctgtagccccagctgctctggaggctgaggcaggagaatggcttgaacctgggaggcggaggttgcagtgagctgagattgcgccactgcactccaggccgggtgacagagcgaaactctgtctcaacaaaaaattaattaattaattaattaattaaataaaattagctgggtgtggtggtccatgcttgtagacccagctactcgggaggctgaggccggaggatcacttgaagccagaagttgcagcctgcagtcagctatgattacaccactgcactccagcctgggcaacagagcgagaccctatctctaacaaaaagagagagagaaggagtcagtggccggcagacagggtggttgggaacgtcctgtgtgagtaggaggaatttaaactgaagcgtggagagtaaggagacaggatgggagaagatcggagttgcagggggtgggaacaacatgagcacatgtcccatggcaggaggggttggtgtgtcagaagaggagaagagagtgtggctggtgtggacggcaggagtgaagaggtaatggggctgatgatgaagggccttgtcagccacgatgaacagtttgcattttcttgcctgtgcaattcagagcctgttctatttgagttcccccaaagcagccccccagacaaggatttcaggacaagtggtgtatgtgggagataaacccaggaagccctaggaagcgtgtgggaaggtccaagagggaagagaagcagcaaacaggggtgcttttgtgagccaggggcaggtggagttcagtcccactggggaccttggggagcctgtgttgactgtgaaactcagaattgccccacctggccaggtgcggtggctcacacctgtaattccagcactttgggaggccagggaaggcagatcccttgaggtcaggagttcgaaaccagcctggccaacatggtaaaactccatctctactaaaaatacaaaaattagccaggagtggtggcgggtgcctgtaatcccagctactcaggaggctgaagcaggagaatcgcttgaacctgggaggcagaggttgcagtgggccgagatagcaccattgcactctagcctgggcgacagagtgagactccgtctcaaaaaaacaaaaacaaaaacaaaaaacaaacaaacaaaaagaattgccccaccccaaggacaagggatttatgcaaaagccagtgcaccatcggttgggggttgctgggaggagtagtgtgaattctgtgatacttccagcccaccacgggcaatgtcagagcaggcttggacagacagaccgagttggaatcccagcctgcacttccaggaaacagggaggaccccagggatctgagcaggaggccaatggcgtcatgtccagagtccacagagcttcactgaccaatacgggagctgccggctacatgtgaatatttaaagtcattcaaatgaaataaaatttaaaatgcaggtcctcactcacactggccacattgcaagcaccctatagctgcatgggggtggctgtgttggctggcgtgggtctagaacattccacgcatcccagaaagtactaataaacagccctgtgctagacaatgttgatcaagagagtgatacaatcctattttgactctaagaagatctctctcttaagagaaaacagctagttgggagtgcaggtggaagttagaaacccggaaaagtgtctggggcaggtgtccaggctggaggtgataaaagctcagaccagtgcagtagtagtaggggtggggcaaagccatttggaagaagcatcaacagaaagtcctgcccattcagacgtgaggggtaaggggagaggagaaagagaaggggaaacctggactctgatgtgagtgacaggtggagatggtcacccaagaggagaagcagatttggggcagatactgagctgcttctgggccttgctgggtctgaggggtcagagggaactccaggaggacgtgcagttggcagctggactctgatggcggagacctgggcagacatgagaatctgggcccacggggtattttggccacaggcccagctggcaaccgctgggctgtgatgtaacttgtcaggcggaagccgagccccgtccccaggctcagaggcacagcttgcctaaatgctaacaagttttgcctccaaatggtggtggggtgtgcgtgtgtgtatgtgtgtgtttaattctggaatgaatttaattctaattccgccgactttggggatgggaaacagctgtcttaatgagttaacagtgggtttaaaatagcaagcatctgttcgctgtctgagccagcacccgctgaggccactcccaggctgcagggctcagttttgggggggccctggttgcagctctggagatagtagggaacagagggctggcagtcctgagaccccagtgccaggcgagtgtcctgccccctcctgggatttctggtgcctcgtttgtgaaaaccgggcctgttgaaccaccgtgcttgagccagaacctgcgcagggggctatgagcaccatgagtgggccaggctgctgctgcgggggtggcaggtggtaagcccgtccccaccctcctcagatgcttcctggctgagtggccagaaatgcctgtgcctcagttttcccatctgtgaatggagatggtgttaagaagtttagagacattaagacatgtaaagtgtgtgcttatgaccgtgccaggcagacagtcaacactgtgggaatatgtaaagagtgtctaaaaagcaaatacaggctgggtgcggtggctcacgcctgtaatcctagcactttgggaactgagacgggaggattgcctgagcccgggaattcaaggccagcctgggcaacacagtaagaccctgtctctaaaaaaaattaaaaatttagccaattgtggcagcacacacctgtagtcccagctacttgggaggctgagctgggaggacatcttgagcccgggagtttgaggctgcagtgagccgtgatcatgccactgcactccagcccaggtgacagagcaagaccctgtttcaaaacaaacaaacaaacaaacaaacaaacaagactgggcacagtgacgcatgcctgtaatcccaacactttgggaggccgaggcaggaggatcacttgagctcaggagttcaagaacagcctgggcaacatagcaagatcccatctctacaaaaaaatttaaaattagctgggcaggccgggcacggtggctcatgcctgtaatcccagcactttgggaggccaagacgggtgggtcacctgaggttaggagttcaacaccagcctgaccaacatggcaaaaccccatctctactaaaaatacaaaaagtagccaggcgtggtggcacatgcctgtagtcccagctactcaggaggctgagtcaggagaatcgtttgaaccccagaggcagaggttgcagtgagccaagatggcaccactgtactccagcctgggaacagagcaagacagtgtctcaaaaaaaaaaaaaacaaaaaaaactagctgggcatggtggcacacgcctgtggtcccagctacttgaaccacacaaggctgaggtgggaggattgcttgagcccaggagctcaaggctgcagtgagctatgattgtgccactgcacttcagcctgggcaaccaagtgagaccctttctcaaaaaaaaaaaaaaaaaaaacaggccgggcgcggttgctcactcctgtaatctcagcactttgggaggcc[134 bp omitted]gaggcaggagaacggcttgaacccgggaggcagaggttgcagtgagccgagatagcaccactgcactccagcccgggcaacacagcgagactccgtctcaaaaaaaaaaaaaaaacaaaaaaaaaccagaaagtaaacgcagcatccgtcgcttaatgatggggatactctctgaggaatgggtgatcaggtgattttgtcctgtgtgaacatcacagaatgtgcttacacacttctagatggtagagccttctgcacacctacgccatacggtatgcttgagagcctagtgctctcaagctataaacctgcagagcatgagactgcattgaacacagcaggcaactgtaacacaatggtaagtactgtgtctctaaacatatctaagggccgcgcatggtggctcacatctataattccagcactttgggaggcctaggtgggcggatcacctgagattgggagttcgagaccagcctagccaacacagtgaaactgtctctactaaaaatacgaaaattagtcgggtgtggtggtgcacgcctgtaatcccagctatttgagaggctgaggcaggagaatcgcttgaatccgggaggcggagtttgtagagagctgagatggtgccactgcactccagcctgggtgacagcacgagactctgtctcaaaaaaaaaaaaaagagagagagagagagaagctgaaggtgtccaggtgcccacaaatgcatccagcctagtgctcacctgcctgagggggtctggggaaggggggagcctttgccccagcagaaggaaggagttggtgtccacggctgcaccttcgcaagggggctggctgtgtagggggaaagttgtcggtgatagggggtctgagtccacgactcagctcttggagaatcctggagacccccatatcattagagaaagtggccagcaccctctcctttctcaaaagattaacagacactcagctgttcatttgatagtgtggggatttacagcccagtcttgggatcagagagacccgggtccagttcagcctctgaaacttcttgactgtgtgaccttgggtgagtgtgtttacctctctggacttggacagtcctgggttcaagtccctgctcatcagccacatgatctgtcctcagtttccccttctgaaaagtgaaatgcccatagtcactgagctgtctaaagcataaaacaagatagcccaccccagccctccagatgtgctgtcattgtgtttattatttatttattcattgattgagatggagtctcgctctgttgcccaggctggagtgcagtgacgccatcttggctcactgcaacctccacctcccaggttcaagcgattctcctgcctcagcctccagagtagctgggattacaggtgcccgccactgcacccagagaatttttgtatttttagtagaggcggggtttcaccatgttggccaggctgatctcaaactcctgacctcaggtgatccgtccacctccgcctcccggagtgctgggattacaggcctggaccatcgcgcccggcctatcattgtgtttaaagtccacagctcctaattgctgaaaaagtcaaacacacgcttcccctatgacccagccacgcctctcctaggtatttatttacccaagagaaacgatgcctacatccacaccaagactcgtacagacttgttcagagcagctttatgcataccagccccaaactggaaataatccaaatgtttacccacaggtaaacagataagcaaacagtggtccattcagaccacagtattctgttcggccataaaaaggaaaagggcactgattgacccaacagcagggctgagcctggaaatcagtaatgctgaggaataaaagtcagacgtaaaaagagtacgcactggtgacatccagaaaatgcagactcatttataggaaccctaagcagaccagtgggtgcctggaaagggttggggacaggaaggaggggaaggagggggaggggttacaaagggagtaatgtattcattttgttggtgatggacatgttcactgtttccattatgcagatggctttatggatatatgtgtctagataatccactccccgcaaatgactcctggctgcctggccacaaccgtcctgtgcctcattttcctcatctgtaagcagagatgttgttaaaaagtttagaggctgccaggcgcggtggctcacacctgtaatctcagcactttgggaggctgaggcgggcagatcaccagaggtcagaagttcgagaccaacctggccaacatggcgaaatcccatctctacgaaaagtacaaaaattaggcatggtggcgggcacctgtaatcccagctactcgggaggctgaggctggagaatcgcttgaacctgggaggcagaggttgcagtgagccgagatcctgccactgcactccagcctgggtgacaagagggagactccatctcaaaaaaaaaaaaaatgtttagaggccacgcctgtaatcccagcactttgggaggctgaggtgagaggatcacttgaggtcagaagttccacaccagcctgggcaacgcaacaaaaaacagtatcgctacaaaaaacacaaaaatttaattagccaggcatggtgatgtgcacctgtgggcctagctactcaagaggctgaggtacgaggatcacttaagcccaggaagtctaggctgcagcgagccgtgatcgcgccacagcactccagcctggacaacagactaacaccctgtctcaaaaaaaaaatttttttaaaacctcactttacctcagtaaaactataaacacacaatacaagctcttcctccaaaaatacctagcctggcacccatcatgcatggggtacccactggattggggacttcatgaccttaatggagacagggaccagtgtggggtggaggagaacttaggagaagctcccacttcctttttttttttttttttttaaattgagacagagtctcactctgtcacccaggctggagtgcagcggcgcgatcttggctcatggcaacatccgcctcccaagttcaagcaattctcccgcctcagcctcccaagtagctgggattacaggcacacactgccacgcccggcttttttttttttttttttttgagacggagtcttgctctgtcacccatgctggagtgcagtggtgtgatcttggctcactgcaacctctgcctcccaggttcaagcgattctcttgccgcagcctcccgagtagctaggattataggcgcacaccaccacgcccggccaattttttgtatttttagtagggacagggtttcaccatgttggccaaggtggtcttgaactcctgacctcaagtgatctgcctgccttgggctcccaaagtgctgggattacaggtgtgagccactgcacccaggcagctcccacttctcgaatcaccctcccccacatctataccccactaccccgatccctgggaaaaggaatctgggccccgtcagccttcgcctctcccaggccacaacaagtaatttctgaacgttgttcactctgccaacaagagacaagattaattatggccataacacaccaggcgccgcctaaatctttcatagatccatgcgcgcactcacacacgcctgcacacgctcacacacagcctgcggctggctctctcattcctctggattttgcatttctttgaaagatgctgcaggtggacacgaggggagatgcctcctctccctccttgtctctttcacctgcctgagcggatcttggggaggaagggagctttcgccccagcgagaggaaggagtcagtgtccacgggggcatctttgcaagggggttggctgtgtagggaggaagttatcagtgatagggggtctgggaccatgacccggctcttggggtaaacctggagatccctgtgtcattagggaaagtggccagcaccctctcctttcccaaaagatgaacagacactcatctattcatttgacagtgtgagggtttacagaccagtcttgggaccagagagaccaggtcccattcagcctctgaaacttcttgactatgttgtgtgatcttgggtgaatgtttttaacctctctgggcctcaattttctcatctgcaaaatgggggtaataatattaatagtatcctatgtcgtggggttgctgtgaggcctaaagcagatctaaattccttagaaagttctcagtgtagggccaggtatacagtaggagttcaatcaattagctatcatgagagttttttgtttgtttttgacacgtagttttgctcttgtcgcccaggctggagtgcagtggcatgatctcggctcactgcaacctccacctcctgggttcaagcaattctcctgcctcagcctcctgagtggctgggattacaggcatgtgccaccacgcccagctaatttttgtatttttagtagagacagggttttgcca[138 bp omitted]tcacctcctgtgctcagatcttatttcttattttttcatccttgcattttatatatggaggctcaaagccatgaaagggcttagtgagggactcatacaccaggatgtggccaaaggaattccgagatgcctcagtgatcttgagacctcttctgtttgccagtgaggaaactgaggcccagagaggggcagagttgactctcaggcctctacttcccggctcagtcctgggtctcttgaactccagatattcccagtcacatccctgcctgtccttggtactgcagccgcagaagctgcctgcctgcaatttaccaaatgtgacagcatcttggccccagtagtgcaacccaagccagtggcatctgcggggctgtcacctcccatgccaggtctgagtgatggttggagggggtgagagacaaacacttactgtgtgcccgagcccagctggctaggtgcttctgcagacttggcggatgactgaagacactcagtgaccccaaggacaagtggcacatgaccccattaggcagatgtggaaactgaggctccaggatggatggaaacactgcaggattccttcccgctggtgggccctggaccgggggttgcagacttagctgtgagcaaaacagacctggcccctaccctcctgggctctcatggcatggggaagatgagccctgagcattaacattataaatagttattagtggctcacccctgcaatcccagcactttgggaggccgaggtgggcagatcacctgaggtcaggagctcaagaccagcctggccaacatggcgaaacctcgtctctactaaaaatacaaaaattagccgggcgtggtggtgcgcgcctgtaatcccagctactcgggagggtgaggcagaagaatcacttgaactcgggaggcagatgttgcagtgagccgatattgtgccactgcactccagcctgggtgacagagcaagattctgtctcaaaaaaaaaagctatgcagtctgctgggtaatgaatcctatgaaaattaaagcaagaaggggcatggggtgccagagattccatggaagaaagtgaaagttagaaactaaggtgggcaatgtgtcagggaggcctcactgagcaggtgacatctcagcagatacttgaaagaggcagggagggagccgtgtggtgactggagaagagtgttggaaacagagggcacagcccgtgcaaagaccctatggcagaacctcgcctggcatgttggaggaacagcgaggaggcccatgtggctggagcagagtgaggaaggggagacacggagggagggaggggaggggagggaggggacgggccaagtcatgcagggctttgcgggctgcagagaggacttgggctttgactctgagggaggcgggagccatggagggctgtaggcagaggagggacggaacctgattcaggtgtccacagagtgaaggtggaggagggtgggccactttagcccaggtagtctgggacggctactctaaagaggtgaccttggagttccagttgagtggggagcagccttgagatgctctagggcaagaaagggcattccaggctggattgcttctaaaaagcttggcctatttgaagaatgccagacagacagtgtggctggagtgagctgggaggaaagcagaggagaaggacctgattgggggttctggaccccccagaacactgaagacaacagtgacagctttcattattatttctattattattattttgtagaaatggggtcttgctatgttgcccaggctggtctcgatctcctggcctcaagcgatcctcccacctcagcctcctgagtagctgggacctcaggcacatgccatcacacccagctaatttttttttaattttttgcagagatcggatctcgctatgttgcccaggctggtcttgaactcctggcctcaagcaattctcctgcctcagcctcctgaagtgcagggattacaggtgtgaaccactgtgccctgccagagccctagagttttaatcttgatctaaggaaatagcaagtcatggcagggctttcagcaggggagggacaaaatcagatggacagggtggtgcagcagacagaacaatgccgcccaaagatgtccacatcctaattcttagaacagaatccttagactgtattatgttacatgatgtagtgggttgaaaagcacactcctaggccgggcatggtggctcagcctgtaatcccagcactttaggaagctgaggtgggggcggatcatgaggtcaggagttcgagaccagcctggccaacgtggcgaaaccccgtctctactagaaatacaaaaattagctgggcatggtggcatgtgcctgtaatcccagctactcaggaggctgaggcaggagaattggttgaacctcggaggcggaggttgcagtgagctgagatcatgccactgcactccagcctgggcaatggagcaagattccgtcaaaaaaagaaggaaggaaggaaggaaaggagggagggagggagggagggagaagcacgctcgtctgccccatcaaattcacgtccatccaaaatctcagaatggcattgtatttagagatagcatctttgccagcctggacaacacggtgaaaccctgtctctccaaaaactacaaaaattagccgggcatggtggctcgcaccttgtagtcccagcttactcgggaggctaaggtgggaggtttgcttgagcctgggagtttgaggctgcagtgagctatgattgcaccactgcactccagcctgggcgacagagcaagaccctgtctccaaaaagaaaaagaaaaaaaaagaaatagggtctttgcagatgaaattatcctggatgtagagtggcccaaaatctaac[135 bp omitted]cccatctctactaaaaatacaaaaaattacccggatgttatggcgggcgcctgtagtcccagctactcgggaggctgaggcag[153 bp omitted]gaggctgaggggagaggatcatttgaggccaggagttcaagaccagcctggacaacatagcaagacctccatctctaaaaatacattttttaaaagaataaaatgaagcaaaataaaccccctgccacaatcctgttccctggggtgaccccccttgacgttctggtgtggatgcttctggaatgttctccggtgtcattctgctctgtcctccggcccccacccacgtgtccaggatgtgagtcctcgtccgctaccacaccagacctcacccttcatcacggctgcatagccttccttttcagggatgatagaggtcacctgccccccagtgacgggtttctggtcatttctggttatttgtctgtcaacgctgaagtgaaggctgctggacgcatctctctgttgctctaaaaccctaacttacagaggcccagtctggtttatttttaatcttttctttttttctttttctttttctttttctttcttttctttctttttttttttttttttttgagacggagtctcattctgtagcccaggctggagtgcaatggcgtgatttcagctcaatgcaacctccacctcccaggttcaagccattctcctgcctcagctcccccaagtagctgggactacaagcgcacgccaccacacctggctaattttttttttttttttttttttttagtagagacatgtttttgccatgttgaccaggctggtttcaaactcctgacctcaagagatccacccaccttggcctcccaaagtgctggcattacaggcatgagccactgcacctggcctgctttctttggaatggtctgctttattttgaatttcaagcgattctgctgacacgaggcgcagacagagttggttctgagtcccctggcccttcgccagtgccctgagccaagggagggtacagggctctcttcctccacctccaggccaccactctgcccccctccaacccattcccccaacacagacagtgggatctgtttattcataaagtagatcacgtccctctcctactcaaatccctcccagggatccctagtaccacttgaataaaacccgaagtcctccccacagcccgtaaagccctgcacaccttgccctgtcccttccctactttgccctgtcccctccctgccctctcctcctcctcaccccctcctctccccctcctcactctgctgcagccacacgagccccctcgctgttcctccaacacgccagggtctgtcctgccccagggccttggcactgatggtgcctcctgctcacccccttgtccaggcaaacgcctcattttgcaaatcacagctccaatatcatttactcattccatacttacggaggagagaaagaaagagagagaggctggggtgtctgagagaggatgtcggaggggaaaagctaggcagggggctggaggggaggggcggggtgtggacaggcttgcaggggggcgtctcggaggctgatgaggcagctgggacagaggtgggggcggcggcccccggatgtgtgcagccccctgccgcccacccccccagcagcgcgctggctgctgcccgtcaacactcgccagagatgcgggaaatattttctctccggctgacacttttggcaaaatacaattcctccagcttttttccgtgcaaaaaacatgtccatcaaacccgtccctgcggcgcctgtggaagagggaggccgctggattgggtccgggaattgcgggaatggctccggggagagatggcagcctccccgccccgctctctctcgctctctctgcagtcagaaggcgacataaaaacagtaagaaaaatagttaaaagcccaccgcgtgttcagtcagcgctggactttctcctatctatgcctgctccatgtgcctgcacaaccctactgctattagccccgggtttccgataagaatgctgagcccagagaggggaagacgcttccccaaggtcacacagcacagttgggatttgaattcagatcctacatgacctccccaggggtgcctcgaagagcctctactgaggagggagaggaaaggaaaagcaacggacaccagagggatcagcagatgtaagagtttcaagcaggcttcatgcaatagctcctgaagccctcagttaaatcctctgtagccagcagccctcagttaaatcaagatgtgactgtggctttcccaactgcctgtatcatcctttcacatgctagtccccacaaacccctaagccagggacaactgtggcaaccacagcaactggctcagaagaaaagaaataagaataaagtttggaagctggcgacacccagatgtcccctcctttcttacccagagtaggaaaagaggaggccttcagtaacaacggtcttagacatgagagagaacatccaccaccatggagattcaaatccaaactgcacccctcacctcctggtacactcagcccaaccatctcaactctgggagccttgaggggttgcaatgtagataccagacatataaaagctgcagtgggccgtgcttaagtggtcgagaatgtcaaatgtgagcctaacagcccggggttcgaatcccagctctgctgctttctcgctgtgcaaccttcagcaagttgcttgacctctctgtgtcactgtttccctgttggtaaaagggacataaaaattcctgcctcccaattttaaatatgttgatgttccaaaaacacatgggacggagcctagcctacaacaggtgcttatacatgtgggatataatattattattattattatttttgagacagtcttgctctgtcacccaggctggagggcagtggcacaatctcaacttactgcaacttctgcctcccaggttcaagcgattctcctgcctcagcctccccagtagctgggattacaggcacctgccaccacgcctggctaacattttgtatttttagtagagacgtggtttc[144 bp omitted]acagggagagccgggacgatgtcctccctccccgcccacccaacccagggaagggcagcagggagatggctctggtcccagagccccagccaccggcggctccctgggcgagggattgacttttctagaatgttttgcccctcctcccagtttccatcaggagccagcgcggccgcataaatcccgctttacggctgttattgacgggggagcagagagagcagccccaggaaggcccaattaattttcccacctggcatctgtgcgccagacgaatttctgaactgctgcagggaggggcagagcgagctggggaaaggccaggctgaggacaaggtcgtgggcaggccgggatatcctaggctcttagcttcagagcactgttgagggagtcccaggctctcttgtctgaagggtagaagtggagggggctgtcaattctgagtagggcttgaagctttcagttaggatgcagatgagggtttcactgaggagacactgaagcaaagacacaaaggaggctagggaggctgccacatggcttttggaaggaacagcttgccagcagagggcacagcctgtgcaaaggccctgaggcaggacctcacctggggtgttggaggaacaacgaggaggcccatgtggctggagcagagtgagtgagggggagacaaggaggaggagagggcagggaggggctggggcaggtcgtgcagggcctggtaggcctcggggaggacttgggctttgaccctgagggaggtgggagccattgagggctgtgggcagaggagagacgagatctgacttaggtgctcacgggcgccctctggctgctgttcagagaacagttgtgggattcacagggaaaacaaaacccagttactaaattctcccaggtccaggtattggctgggatctgtaaaccagagaccc[132 bp omitted]ctccatcactatttccaaaactttctcatcttcccaaattgaaactccatctccatgaaacactcactccccacccccctccccagcccctggcactccccatcctacgttctgtctctgtgaatctgatgactctagggatctcctaggagtggagtcacacaagatttgttcttttgtgtctggcttctctcactgagtgtgatgtcctcaaggttcatcaatgtcatcgcctgtatcagaatttccttcctttttaaggctgagtaatattccattttatgcatagatcacattttgctcatccattcgtctgatgaaacacttgtgttgtttttggcttttgcctatcgtgaatcatgctgctatgaatgtgagtgtacaagtatctctttgagactctgctttctatcaaattttgtttgattttaattaatttaatgtaaacagccacccatggctagtgactgccatattggacagagtggctctgcagaatggaaagagaatagaagagaatgaatttttttctttcttcagtgtgattgaattctctgtctgggccaacgaatggcaggcatctcatgagtcaatgacagttataagtgtcccacactagaaccaattgtccagggcagacacatcccaagagccagggcgaccatggaaaagcccctgcctaggatgaggtcccatggtcctgctgctttcttctgcccaagggcaggtggtctggatccaacaggcttggggacaagagccaccatgtccttagccacccctttctggctgttgctgcacagccctgcttacaagagacccaaggcagccacacctcaccccatggccatgggcctcatgaaggtggtgcccagggagatcgggtgggagatctgggactccttggattgcacctgtgctgtagaagagccttgaaggaaatgtttaaatggaggtgtatccattagctattgctgtgtaacaaagtacccacaaacctagcagcttcaagcaacacatttattatctcacagttcccatggattgggaatctgagcatggcttagctggggcccctgcattagggtttcttacaaggttacagttttggtgtcaaccaggactatggtctcatcagaggctcgactggggaaggatccatttctaagccttctcgggttgctagcaggattcatttccttgtggctgcaggattgaggtgcctggcttcttgccattggctgaattctgctctcagcttcaagaggctgcccacagttccttgcaatgtggtccccaccctgggctgttcacaatgtgaccatgtgccagtaagagagaaaaagagtagtgagattgctagccagatagagtcttatgtaaggtaatataatcatggaagcaacattctgtcacctgtgctatatactgttgatgagaaacaagtcacaggtcatgcccacactcaagagtagggaattatgcacaggatgtgaacaccagaaggcaggaatcatgggagccactttaggatctgtctgccacaggagataaagagagcaagagttttcaatggctctgggccccaaggggtttctgggagacagggaaggaagaaaaggaggggggaaggaggagctgagagtaagagagattgggaattgggaggaagggaaaaagaaagacattaaattccatctatatctgtggtgccccacttttgcccagccttgtacccagaaaagtaccagccctggatttttctatgtctagcacagatactcccagcctagtctgacatttgctgtgataagggaggttggaaaaggttcctgatccaatgtggggttgggaaaggtatcctggaggaggcactttctgtgctgatccccaagtttgagacagagccaatgggtgagaagggggagtgggttcttgctggagagaccagcaagaacaaaggcccagaagcatgaagcagagatgtatgttcacaccaggagagcagagtgataatacaagagggtggaggaatgggtcattactttgcctcttagggaggtgatgttgtacccattgtacagatgggaagactgaggctcagagaggtgaaaccactttctccaggccacagggctaagaagcggagcagcctcattcgtaaaatggatgtttgaggtcctcattagatctcacatcctggctctgaggcctcctttgtgactcgggatcaaaaacaagaataataataatagcagcagtatttgttgatcactttctatgtgctaagtgctcttgtaaatgctgtacttcagaagtcagccagggacaaatacagtccaacacctgtttttaatttttttttttgagacggagtctcactgtgtcacccaggctggagtgcagtggtgcaatctcagctcgctgccagctccgcctcctgggttcacaccactctcctgactc[176 bp omitted]ccggacaacttttttaatagttgaaaaaataaaataatattgtggtgctgaacacagtggctcatgcctgtagtcatgtcagtgtttagggaggtgaggcgggaggattgcttgaggccaggagttagacaccagcctgagcaacatagcaaaaccccatttccaccaaaaatttaaaaattacctgggtgtagtggtgtgagcctgtggtcccagctactcaggaagctgaggggagaggatcccttgagcccaggagttcgaggctacagtgagctatgatggcaccactgcgctccagcctgggtgacagagcgagaccccgtctctaaaaaaaagaaaatagtaaacataaaataaaataaaataaaaacttgtcttttgggacacatgaaaatatgaaattccaatgtcagcatcaacaaataaagttttactggcatgcaaccatgctcatttgctcagctatcatctatgactgcttttacacgactggcagagttgactttctggccaaaacttttgactttctggccccttacagaaaaagcttgccagcccctgctgtcatgtgttcactctttgcaacagccccatgagttagatgctgtgtcttccttcatttatacagatggggaaactgaggcatacaagctgaagtggctcagctaaggttatagtggataagtgatcaagcggggatttgaacacaggtctgttggactccccataaggtgctctcactgctgtgtcatgccttcttgcccagcccttggtgcttaaggctgggagtgcctgagtctagctctttctctccctagcctaggatccctccagagggctgggctctgcactgagccttagcagaatcccagcatccttggacccggggaggtgcgccagtcagcaaagtgcccaaagcaagctccagaatccaccttgccccctcctccagggcccatccgggaaggcagccagttaagcgcaaatcaattaaacaaactccatgctgcctgccgccctcatattctgacctcagccaagaggctcgcattccagcctggcggacttgggtccaagcaaatgcacttgtgggaggatctgagaaggggctgcaggatcaggaatccatacaaagaactccagcctggccccctgggagcctgtgatacttagtttgtataatctgatcccccttggggaacatggtggggaggtactgtgtgagcaaacgcggggaggggggaacctgtggaaacaagagcctgttctgcagaagatgagctgctcagtgtgacggagagtgcaagggaacagtgagaaagaagcctataatttgctcattgtatgtgtcaatcaagcgatagaggttgctgtttcttcgttgcatgctatctgagagatttgacacctgaaaaggaagtatcaaaatgcaggctctccctgctggactcaaacctacagccgtcttgtaagggcctgaagacagagcagagacactaagaaaagggggcttctggatccagccattcctgaagtccatatacccctggacttttcactttacaacctgacatttatgtatatggtgtctgcatggtaattaatagtggtcttgtcaaatatttcttgatctttaccttctgaaacatagaagactagattattcttcagcaaatttcattcaacctcttcccaaagtttacgggagaaatgcccttccctgacccactgaggccatcccagctacgtgacttgctttggtcaaggcaatgtgagggaatgtgacagtgtgccaattctgcacttaggtcttcagagtcactgcatgtttctacatgacctctcctgctccaacctttagccctgggtcaaaaatgccttgaaaagccactaagccaaggaagataaaaaaacacatggacccggcctgacccaattcacagggtagaactgagcccagctgatctgcagatgtgagaaggagaaataaatgctggtcaggcacagtggctcacacttgcagtcctagcactttgaggggccaaggtgagaggactgcttgaggccaggagtttgagaccaacctgggaaacacagtgagaccttgtctctacaagaagataaaaaattagccaagtgtggtggcacatggctgtagtcccaggtacttggaaggccaaggcaggaggatcatttgagcctgggagatgaggctgcagtgagctatgatggcaccactgcactccagcctgggcaatgtagcaagaccctgtctctacacacacacacacacacacaaattttttttttgagacagagtctcgttctgtcgcccagtctggagtacagctgcacaatctcagctcattgcaacctccacctcccgggttcaagtgattctcctgcctcagcctcctgagtagctgggattacagacacgtactaccacgcctggctaatttttgtattttgagtagagacggggtttcacc[139 bp omitted]acctctggtcctaactacttgggaggctgaagcgggaggatcacttgaggccgggagttcgaggctgcagtgagctatgatcacaccactgcactccagcctgggggaacagagtaagaccctgtctctggaaaagaaaaaaagaagtgcttagggttgtatgtcaaagagatttggtggatgtcatagctacggctattacatgagcacagtttgggattgaacttcctggcttctgcaatgggttggattgagtgggaatgtaggatgggttctagacaacatggtgaaaccctgtctctactcaaaatacaacaattagctgctaatgaaataccctccagaaccctgttttcttctgccacagaaatcaacaagttccaggcagtgactgctccatcagccagggtcctggagggaagtgataatcttcaagtccctggcccaaaaggtcacaattgcatatacaatgtgagtgagaaataaactttggatgttcttagcctctgaggcataggggctgtttgattactgcagcaaaaccaagcctatcctaacagatacaacaggaatggaggcttttgataccacagaaaaaggtggcagacagtggcatagatcctaggcaaaaaggaagactccagaccctaactggtaacatttatcaagtccttgctgtggtccaggtgctctgcacagcgcttcttttgagagtttacatgcttacattgaatttgcacactcatgctatggggtaagagctgatttttttttgagacggaatcttactctgttgcccaggctggagtgcagtggcgcgatctcagctcactacaacctctgcctcctgggttaaagcgattttcctgcctcagcctcccgagcagctgggattacaagtgtgcaccaccacgcctggctaatttttcttatttttagtacgaacggggtttcaccat[131 bp omitted]aggaaactaggctcagggagggacataattcactcaaggtcacatagcagggaataggtatagctggaatttcctgccagacctgtctgattgcagagtctgcctttgcccacaatccaccttcctcctggccatgatacgacgttccaagggtctgcagccacatggtttatcatctccaccaacgggacttgagaccacaagagaaaccacaaacctcaagccctaaagcttctcaaactcacctgttgggatttaaatctttcaaggagacctagtagctccccagagtagcctcatagagccaccatccccatgcttccagttccttctatgatctcaccattattacatgggggaagatttctctctctcttttttttttttttaagagacaaggtcttgctctgtcacccaggctggagtagtacaacggcacgatcatagctcactgaagcctcgaactcccaatctcaagtgatcctcctgcctcagcttcctgggtcgctgggactgcagatgtgcaccaccatacct[131 bp omitted]cctcagcctcccaagtagctgggactacaggcgcccgccaccacacc[242 bp omitted]cttcagcctcccgagtagctgggatcacaggtgtgcaccaccacacccagctaatttttgtattttcacggagatgaggtttcaccgtgttggccaggcttatctcaaactcctgacctcaggtgatctgcctgcctccgcctcccaaagtgctgggattacaggcatgagccaccacgcccggcctacctggctaatgtttaaattttttgcagagatgtgttctgccgggaaaaaaaaaaaagacacacctttacgttgcccaggctggtttcaaactcctgacctgaagtcatccttccactcagcttcccaaagtgctgggattataggcacgagccgctgtgtacttgccatcgtggggggattttatatcccagacacccagaactgccccttagcttctgttttttttttttgttgttgttttttttttttagacacagtcttgccctgcacgtcaggctggagtgcagtggtgccacctcggctcactgcaacctctgcttccccggttcaagcaattctcctgcctcagcctcccaagtagctgggatcacaggtgtgcaccaccacacccagctaatttttgtattttcacagagatgaggtttcaccgtgttggccaggcttgtctcaaactcctgacctcaggtgatctgcctgcctccgcctcccaaagtgttgggattacaggcgtgagccactgcgcccagcctgaaagcatcatcttttcttttttccttccatagcatttctcaccttctaacacaccctgccacatacctacttgtcactgtattccacggg[133 bp omitted]atggagaaaccccgtctctactaaaactacaaaattagccgggcatggtggcgcatgcctgtaatcccagctactcgggaggttgagg[131 bp omitted]aacgttttcaattgctatctcatttcatcatcaccatcatcacgttgtacagatggggaaactgaggcccccaaagggacagagggtttttcaaagccaccgatcaagtctgaaatcgactcccctgtcctgaggtttgtctccgccctgcagcctccatcccccagttccaaatcagggcaccccggacattccaggactggcttcaccctgacatcgagctctggccgagctccctcgtttggtgaaaatctaatcacgccagcctgaatgctgacatcgaaatgactgccgagcccttgactcggggtaattaggagcattttgggatgccttgcttgattaaaagcagatcacccgttcagaatgaaaattcaggaggcagattgcttttgttgttgccacgatgctattttaaacccacgcagctctccagctaataaagacccgtcaatcggctgtcggggtgttcaggacgaactgtctgcagggttcccccactgctgtttaccacagcaccacagcccagagggacccctgtcaggacatcagagccagcagggtgcaggttgacctcagtgtcactcccaaacctctcagggttactccccgtgtctgcctggtccctgaaccagaaagtcagatgtcgacctggtctcttctcgccctcatcccctccccagatcctatcccacctgtccccaggaccccctcctgcccggattccagttcctggctcctccctggcctctagcctcccatccgtcctccccagaaagctccttttttttttttttttgagacagggtctcgttctgtcacccatgctggagtgcagtggcaagatcttgactcactgcagcctcgacctcctgggctcaggtgatcctcacacctcagcctccagagtagctgggaccataggtgcatgtgccaccatgcctcatttttgtacctttttgtatagacagggtttcactatgttgcccaggctggtctcgaactcctgggctcaagtgagcctcctgcctcagcctcccaaagtgctgggattacaggtgtgagccatcgcacccagccccaagaaggctccttctaaggtttgctcagcctccctgtgctttgacttcacccaatgaaccacttcttattcttccagactcagtcacctcctctgacctccaggctggcccagagaccccctcttttctctaatcacccaggtcggaaccaccctttcctgggtccgcctcctgcctggactgtgagccatgtgtggatggggtcaggtctgtggtgctcactgatggttctccagagcccagcacaggt[146 bp omitted]accccatctctactaaaaacacaaaaattagccaggcttggtggcatgcacctgtaatcccagctactcgggaggctgagacaggagaatcacttgagcccaggaggcggaggttgcactgagctgagatcgcgccactgcactccagcctgggcaacagagactccagtaaaaaaaataaataaataaaaataaaaatactgatgaatgaaggaatgaatgcatgcatgcattggggtgggaggtactaggaacaccctggatctcaaggtatcgggacctcaaatggcccatctctctgccctgaagcacccccttctgccagtctaggtcctgacctgcaccccagccagggggagggacagaggcctccctcagagactcagccttcagctcatgatttccccagcagaggaagggacaggacagccccttagcctgaccccttccccaccccaacccccaaagacaccaatatgtccacatcacatagatgcaggcattctgtccgaccccaggaacagataatccaatgccggggagaggatgggggtgggctccagggctgggctccctgtttttcaggggccagtggctgggcatggagttggacgacagagaaggccctggaggccaagggaaaggattccagcagaagatgcgggggagggctgcagtgggaagtctgtcctgtagtctaaccttgggccggggagtgatgtaacacagcggttctccttgtgggtgattctgccccccaagggacacttgaccatgtctgggggtatttgtgcttgtcacctctccgtagcgggggtgtgctgctggtatccaatgggtggaggccagcgatgctgtggcacaacctaaaacgcacaggacactccccacctcagagagtaacacagccccagatatcagccatgccatccgggcgcggtggctcacgcctgtaatcccaacactttgggtggctgaggtgggaggatggcttgagcccaggagtttgcgaccagcctaggcaacatggtgaaaccacatctctacaaaaggaaaaaagtacaaaaaattagctgggtgtggtggtgcatgcctgtggtcccagctactcgggaggctgaggcaggagaatcgcttgaacccaggaggcggaggttgcagtgagctgagatcatgccactgtactccagcctgggccacagagtgagcctccatctcaaaaagaaaaaaggccgaaggggagagcatctaatgtcagctaacacttagggacacccactctggcccaggcttttctgggggctgcttgaccaccctaacttcccgtgaggtgtgcatgaacatcattccatttccagatgtggaaaaccgaggcccacagcagcaaagccacagccccaaggtcgcacggtgtgtttgaaggtcagccacacgggggcaaggaattttgtttctggctaattcactgctgggtccttggggtcctagaatcaggcctggcacatagcaggtgctcaggaaacactgaatgaatgaatgaatgaatgaatgaatgaatgaatagcagagctgggattcagacccaagctggtggatgccagagccccccactcgcagccctgggctcggagggggggacttctgctgccctttatgtccctgcaaccccctggactgctgagccccacgggccaggcgctgtcaggatcctggaggccgcagctgatgtttaaagtccctattgtggttcctgaaaaaggagcaggtgttggcagcttggcttcgccaaggaggccctgcggccggcgcctttgtcccttgagctggtaaaatcctctgctcggccgctccattcaacccactcaattccacgttccactttcacccccgtccacattcttcgcctgcaaatcccccattctgagcggctgggcccaaaaggcgggcgtctttgttcgtcttttcttgtcctcctctgcccgttaatctaatcgcttcctctctgagatgcgggaggaaggagaagggagggaggaaaataaacaaatactgagggtaaaagaaaagattcgccgaggtttccattgaaggggatttcgcctgccactttgagatattgacaaaggctggtggggggcgaggggaggcttgcggcggggaagtcgggcactgggcgggtggacctggctcccggcgctgcattgagatattcagaaaaacaaattcatctggcctgtcttcctgacagtttgactgccagacactggtaagtccaggccaggggagacagctgtcaaccatcccgagctgaagagtttgggaaggaaggcagagaccaacggggcccattcccctctctctccccgatttgctgtgtgaccttgagggacatgcctgctgtctctgtgccttgtcactaagaagcggccctttatgtccccactttggagggatggaggattcaggggtgctcagagagtgaaaggtgtttgcacaagtttacccaatgctgccgaagcaaactcctggtttagggccccttcccaggacgagggaggaggggagagggctagaggctggtcagagggtccagatggagctcaaaagccgtcaacccaatgtcatcccacagggattcccaggtgactgagggaccctcttctgtctgagtcctcggccttttctgtatactaataatcttgtttttctttttcttttttgagatggagtctccctctgtcacccaggctgaagtgcagtggtgtgatctcggctcactgcaacctctgtctcctgggttccagcgattctcctgcctcagcctcctgagtaactgggcttacaggcacctgccaccacgcctggctaatttttgtatttttagtagagacaggtttttgccatgttggccaggctggtctcaaatgcctggcctcaagtgatttgcctgcctcggactcccaaagtgctggtgctgggattacaggcgtgagccaccacgtccggccaagacgctatttctttaaaaaaaaaaaaaaaatcagcaggtgttgtggtgtgtgcctgtggtaccagttactcaggaggctgaggtgggaggatcacttgagcctgggaggtcaagactgcagtgagccatgatcgtgctactgcactccagcctaggcaacagagtgagaccttgtctctatttaaaaaaaaaaaaaatagatgatggccaggcacagtagctcactcctgtaataccagcactttgggaggccgaggagggctgatctcttgagatcaggagtttgagaccagcctggccaacatagtacaaccccgtctctactaaaactacaaaaaaattagccgggcgtggtgccacacacctgtaatcccagctactcaggaggctgaggcaggagaacagcttgaaccccagaggcagaggttgcagtgagccgagatcgcgccactgcactccagcctggacaacagggcgaga[134 bp omitted]tgaaaccccatctctactaaaaatacaaaacttagctgggcgtggtaggggggtgggcgtctataatcccagctacttgggaggctgaggcaggagaatcacttgaacccaggaggcagaggttgcagtaagccgaaatcacgccattgcactccagcctgggcgacaagagcaagactcggacttaaaaaaaaaaaaaaatgcatgaaaagcccaaggtttggtgcataaagagatggcagaaatcaaagtctcagagatttcgtgcaaaacttgcccccaaaggatcctgcaatcccacccctaggcttttattttctttgatgatacacgtgcctgtgtccctgggtggggaatcttgctattgttaggaaatgaaacgccaccgcctgagcttgattgcgttcttcccacccccgctgcccaggatccactcacaatgggggacgggggacgtggggggcacggaagccccaacacgggaggtggaattaatcacagcaccatacatgggaggtgcctcaattgttgcaatctatgtaatgagagaaaaacaaaaatgactgcttccctgaggaattagagggaggcgttttccattagggttttgttgatgaaaaaggacacgattagagaaaatcctgttgttggcagggccctggtcccgggttcgagccagagaggggcactccaaggaaacggtgtctggggccgggagcagggctcacgcctataattccagcactttggggggccgagacgggcggatcacaaggttaggagtttgagaacagcctggccaacatagtgaaatgctgtctctaccaaaaatacaaaaattagccaggcgtggtggcgggcgcctgtagtcccagctactcgagaggttgaggcaggagaatctcttgaacctgggaggcagaggttgcagtgagctgagatcgcgccactgcactccagcctgggtgacagagcaagactctgcctcaaaaataaataaatacaaaaatacaaaaattagctgggcacggtggctcacacctgtaatcccagcactttgggaggtggaggcaggcggatcacttgaggtcaggagtttgagactagcctggccaacatggcgaaaccccatctctactgaaaatataaaaattagtagggtgtgctggcacacacctgtaatcccagctactcaggaggctgagtagaattgcttgaacatgggaggtggaggttgcagtgagccaaggttgcgccattgcactccaccctgggtgacagagcgagactctgtctccaataaataaataaataaaataaaataagcaaacccttgctgttgtggaagaagatggagccaggatcaaacaggctgaaaaatagggtgatagagctgtctgggaggtgcacagggcaagagggatcatagaaggcttcctggaggaggcggctctgcaaagacagcggaaggaagagttagaagaaggagccaagagaagagatgtgggggaatgttttaagcagaggtggcagcctggaggtgaaactgtgtgtgactccctcaggcaatcggggggtacaggagagaggctgggagaccagggaggagatctggggtgggagtgggggactagcattggggcagaactgggaggggacagatgggagggagggcctggaggtagagcaggcaggatgtggggacagacaggctgtgatggagaggggagaagctggacagaagccagtgtccaggtctccagttcagggatgggggcccagtgggaccaccgctgagatggggacctaagagaaagagccagctgaggggagaggccgaggccagggtggccactgagggtggaagtcctgaaggatgttcaggggggaaccccagggtgatggctgggctcgcaggagggacactgagctacagtcagagctctagcatccatgcagcactgccgttccctctgcccagaacacccttccccatgctccacctgactacactgtcctctccctccaggtctcaacctggaaggcacctccaccttggagcccccctgggctgtacatcccccatgacagccccactgtcactgcccggtcaccgcgagctctgtagtggtggggctgcctccatctcgtctctgctgtgtccctagcacacagtcagcaccctaggcctgtctgttaccagagcaaacacatctgtcattttcaccatcatgtacccagcacccatcacggccctttggtaactctcgccagtcatctcatctcacatggctctttgaggggccaccacacagagggaatcgccagaggccggcctttcacatgcaagtgagaaccgggctgtttccaactgcccaggtcccagaagaaataaaaaaaaggaagaaatgggccaggcgtggtggctcacacttgtaatcccagcactttgggaggccgaggcaggaggatcacctaaggtcaagagttcgagaccagcctggccaacatggtgaaaccttgtctctactaaaaatacaaaaattagccggacatggtggcgggcacctgtaatcccaactacttgggagactgaggcaggagaatagcttgaatccaggaggcagaggttgcagtgagccaagatcgtaccacagcactccagcctgggtaacagagtgagactccgcctcaaaaaaaaaaaaaacaaaaaaacccacaaaatcacgaaagtaggtgatgaagtcaggaaactcagaagtgttatttaagcttaggaaatcaggagggcttcctggaggagatgatattggaggtgagagaatcaaaagttgagatggagctggccaggtggatacctggagcaagagcactccaggcagaaggcacagcccgtgcaaaggccctggggcaggactgcgcctggggtgttggaggaacagcgaagaggcctgtgtggctggagtggagtgagcaatgggagagaaggaggagggaggtcagggcagggacaggcgtgcagggcctgtgggccttggagagaacttgggctttgacccccaagggagatggttgccatggagggtctccataaacctcttcctcctgagtctctgcgactgtagctcccaccacctcatgtggagagaacctcaaaaggagacctttgatgctctccgggaagatgagatgatcctcacccccgacgtagccctggccatggctcctccttcttgagcaagtcccagcctggtcccaggtggctcaactcactgctgcccagaaccccagcatggctgcctcatcctcagcagaatcaagtccccacatccccacacttgtcaggcttctgccccacacatgaagagctccaaccaaaaccatttaggtctgcccctcccacccctatcgttgtctccaccatctcccacctgccagggttggggtgggggctccgggagagaagccacgtgcccttggtttccccatccaaggcatggccacatccgtccctgaaggagttaagggtacaggaaccgtagtggccatcactgtatctgaaattccagcattagggctccatccctgcagaccttgtagaaatcactagtggagttgcttattcactcaacaaacaccgacccagtgcccactttcagataagtctaaaccaggtgcagccccagccctgggctgactgcagccgagtcccggacctgacctgatcctaaccatggactgaacccaaatcctggctgagcttggactgaatctcagaccctgggttgagccagggtcaaccagggtcagccccaaccgcagactgagctccagacttggactaaccctgcctgagccctgctgaccctggcctgagccctaatatcgacagagccccaaccccaggctgagccccaatcccagcccgagccctaatatcgacagagccccaaccccaggctgagccccaatcccagcccgagccctaatatcgacagagccccaaccccaggctgagccccaatcccagcccgagccctaatatcgacagagccccaaccccaggctgagccccaatcccagcccgagccctaatatcgacagagccccaaccccaggctgagccccaatcccagcccgagccctaatatcgacagagccccaaccccaggctgagccccaatcccagcccgagccctaatatcgacagagccccaaccccaggctgagacccaatcccagcccgagccctaatatcgacagagccccaaccccaggctgagacccaatcccagcccgagccctaatatcgacagagccccaaccccaggctgagccccaatcccagcctgagccctaatatcaacagagccccaaccccaggctgagccccaatcccagcctgagccctgactctcggctgagactgtagacactgcctgactctgagtgtcagattcttttaccgcccctggaggaggctgaatccctcccagctcggctacctctaaatcctaaagcccacccggtagcctcagctgcactgacccacgctggctcagccagatccagaaggtgggagggtcttgccccccttgctcccctcagagaccccaggactggaagtttcccagtggcccagcagtgagagtgagcgggttaaggccccggctacagtgggtgggcctcaaatgctctagcctgggaggccctgccaggcgctccatctcctgcccagcgggggccgcattagccgctcaaaacccattcggggaaattagagcagaggcctctgcgacaatcacgggtcattctcgtctcctgttcccaggctctcccgcagcgatgacagcccagcaatggggctggggggtggggacacagggagattgggggatcccagccggccggctcaggctgaagccttctccaagtcagccagggaaagaaaactgtaatcactgcgggctttaaagacatcacttctgtgctccagtgctttccatagcttccagctgacaaagatgtccaaatggttcaatccaacaagcaacagtgaggtcatggcagcaccaggggagaagcccattctgccagctctccatctttctgcccacagtgtgtgcattttacgaatgtcctccagcctcggcaggtcaggaggcaaagtaggtcaggtttacatttaattcagaaatgaggtggacttcaggaatggtttgatccagcattttcaagtggtcttcaagaatcaaggttcagcagtacgcggtgcctcatgcctgtaatcccagcactttgggaggccaaggcaggtagatcacctgaggtcaaaagttcaagaccagcctagccaacatggcaaaaccccatctctactaaaaatacaaaaattagctgggtgtgagggtgcttgcttgtcatcccagctactcaggaggctgaggcaggagaatcacttgaacccgggagacggaggttgcaatgagccgagatcacaccactacactccagcctgggtgacagagcaagactttgtctcaaaaaaaaaaaataaaaaaattaattaaataaataataaaaattagctgggcatggtggcaggtgtctgtaatcccagtcacttgggaggctgaggcaggagaatcactttaacccaggaggcagaggttgcagtgagcagagatcgcaccattgcactcaaggttcagcagggcttggtggctcatacctgtaatcccagcactgtgggaggccatgacaggaggattccttgagcccaggagttcaagatcagcctgggcaatagagtgagacctcgtctctataaaaacaactttgtttaatattagctgagcgtggtggcacacgcctgtagccccagctacttgggaggctgaggtgggaggattgcttgaggccgggaagtggaggttgcagtgagacaagactgcaccactgcacaccagcctgggcaacagagtgagacccagtctcaaaaataaataagtaagtaaaaataagaatcaaggttcattctatcctgagagatctactcccagcctcttccccaacattctgcaagttttccacctccaggttttcactcaaacaagagccctcacctgactggctgttccatgcccacaggtagcacagcagtgcagttcctgaaaagggggtcaggaagctggctactacccaagccaggaattctctgcccttttccaggggtaagtttccccacctagaaaatgagaggattggaatccaggattcttagaatgtctttcagctctaagtctcggtgaatcagaagcccccacagtgggtagttttcggggattagtcctctggtagccattttagtcaacaggcaatatcagtgcgcatttgctatcagctgtgctagggcctctggactgtgataacctctaatcttcacctcctgtgtgaagtaggtactgctccattttacagaataagaaactgaggctcaggcagatccagcctcctgctaaacatcacacagctgtttggtggtagagccaaaacgtagccccccatgctacagcacctctagtcctcctggccaggatttctgggtccaaatcttcaattctggcaatgagagggaaggtggaaggaggcttttttctcccatgaatgcatctccaggtttgtcatgaaggcagtggactcagtttacttcctggaactcccccttcccctgcagggtctcccacattgctgacaaatgcacctccttctttcacagatgtggaaactagggctcataaaggaaaagtgagtctcctaaagtcttactgccaggcaatgcaatggtgtcttcatcagtctggatggactgctacagtaacaaagaacctcttggagccagcctccaagatggccccaatgagcctttgcctcctggtattcatgaccttgtggggtctcctcctccactgaatcggggctgactcgtgaggcatataaaagtgacagtgagtgacttctaaggctgagccttatataaaaggcacttcaacttcctccttggatcaacccctctaggaatgagccagcagccatgttggaagaacactcaagcagtgctatggaaaattctgcatacaaaagtgaaggacaggctgggtgtagtggctcacacctgtaatcctagcactttaggaggccaaggcagatggatcacttgaggccagaagttcaagaccagcctggccaacatggtgaaaccctgtctctactaaaaatacaaaaattagccagctgtggtggcaagcacctgtaatcccaggtactccagaggctgaggcaggagaattgcttgaacctgggaggtggaggttgcagtgagccaagatggtgacactgcactccagcctcggtaacatattgagaaagaggaaagaaagaaagagagagagagagaaagaaagaaagtaagaaaggaagagagaaagagggagagagagagagaaagagggagagagcgagagaaagggagaaagaaagagaaagaaagagagaaagagggagagggagagaaagggagagagaaagggaaggagaaagaaagagaaagaaagaaagagagaaagggagaaagagagaaaggaactcctacccacagccatgtggatgagcttggaagcagctcttccagccccagtcaagccttcagatgatacagccccagtcaacatcttgactgcaaccttgtaagaacttcggagtcagaattgcccagctaagctgctcccaaattcctgtcccataaaaccatgagaggtaataaattattattttaagccactaatttttcaggtaatttatacaaccacagtaactggaacaagctcctaaatcttagtggctctaaaacaaccaaggtttatttgtcatccacactatatgcccaatacaggttggcagggggcctctgtgtctgcctcactcaggcattgagacagatggaggaaacatcagtggtctctaagagaggggaaagaatatgaagaatgggatactggattttaaaggcttttactgaaggggattaacatgacttctactcacattttattggccaaagcaagtcatgaagccacacctcacttcaaacggcagctattggtggggtgcagtgatttacacctttaatcccagcactttgggaggctgggacaggaggatcactggaagccaggggtttgaaaccatcctgggcaacatagggagactccatctttacaaaaataatttttaaaaatagctgggcatgatgcatacctgtagttctagatacttgggaagctgaggtgggaggatcacctgaacccaggaggttgaggctgcagtgagccataatcacaccactacaccccagcctgggcaacagagtgagaccctgtctcaaattaatacaaaaaaaaaaaaaaaaaaaaagacaggtgtatgattttgctggggctaccaaaacaaaataccacgaagtgagtggctcaaacaacagaaatgtatttcctcatagttttggggtttttgttgtttgtttgagatgaagtcgtgctctgttgcccaggctggagtgcagtggcacaatctcggctcactgcaacctccacctcccgggttcaagcgattctcctgactcagcctcctgagtagctgggaatacaggtgcccaccaccacgcccagctaattttttgtttttgtatttttagtagagatggagtttcaccata[134 bp omitted]catgtaagcagggccatgctccctccaaaggctctagggaaggatccattccgtgtttttctgctggcttctgctagttccttggcttgaggtggcataactttaatcttcacatggcgtcctccatgtgaatcttagaatttctgccttcaacttctcttcccttctgcctattacatagcatttccccagctccaagcttccccatatccctccaaagtccagaaaatcaaataagttattctttatctcaggaacttccaaatttcaccttttccctcctcttgtctgttatttgccatgtctaatagagcaaggttgcaatgtcacctttcaccagaagaggctgctcacacacacacaccgtctatcttccagctaaacaccatccctgccttggtttgtagtagatgaagcttgaaattgcttatgatcactaggaagtcagggacacctcagcatagaaactcccacagtcatgggcttaacaaggctgggcccataacagttgttggttgtaaacctgggaggcaggtggtattgaccccattttataaatgggaagtctgagaagcccagcgttgcagacccacagtcttttggcttccatatgtgacctggccctatattctttactcatcttttatcacctacctgatatctaatccctcaaatcctgtcctgtctgccttcaaaacctatccagaatctggccactcctctctcttcctctgccttcaccctggtctgacatctcatcgtcacttgcctggaaccacacagtcccctcttccctggtgcccagctcccgacttcaccccccacagtctatcctcctctcagcagccaccaggggcacctgtgagcacctgagtcagatcctgtccctcctctgcccatagccctccaagaagcattcccagaggagataatacatggtctaagaattcaattccaccaaattagctggaaaagaaaggcagagatttgctcctgcacaccagcctctccccaccttcaggactttacccacacagcctcctcctttgtccagagaacccttcccttcctcctcacctggcctactttgcccagtaaattggggcagagctgggtgggtattctgcatgccctttccaggcaaagttgttccagttcctcatgtcctgcagggtgagacattgagctcctttctctttgcttgctcatcccagaatctcagttttctcatctgataaatgaaaatcaaagagacaatctcttgggtctggctcaaagagtattctgaatgcaagttagtataaccatcattattatttatgaccagaagctccatagtaacatttgtcaagactcttttaagccaccggcctcagttccaatcccacttcctcagagaagctcccttgatatggactaaatgtttgtgtcccccccatccaaattcataaattaaaaccctaacacccctccccaactatgggatggtaattgaaggaaggctcatgatgggattagtgcccttacaagaagagacaccagagagtttgctctgtttctgccatatgagaacacagcaagaaggtggccatctgcaagtcaggaagagagccctcaccaggagctaaattggctggcgctttgctctgggacttccctgcctccagaactgtgagaaaatgatcttttgtttaagccacgcagcctgtggtacagacagtccctgatttacagtagttcaacataatttttttattttttgagggtgacaaaagcaatatacatttagtatgctactctaagtcaagtagcagtgaggtggaggctgggcatggtggctcacgcctataatcccagcactttgggaggc[134 bp omitted]gaggcaggagaattgcttgaacccaggaggtggaggttgtagtgagttgagatcgtgccattgtactcccgcctgggtgacaagagcaagactctgtctcaaaaaaaaaaaaagacaatgaagtggcttccaggtaaacccattataagctgaaaatattgtaaatctaaaacgtattttgacttatgatattttcaacttttgatgggtttattgggtaatgaccccattgtaagttaaggagcatctttgtttagtgatggcagctggagcagacttcactatcctcacagccccaccccaaccaatccccgttttatccccttcattaacttctttttttttttttttttttttttgagacacagagtctctgtcactcaggctggagtgcagtgacgcaatcttggctcactgcaacctccaccttcctggttcaggtgattctcgtgcctcagcctcccaagcatctgggactacagatgcatgccaccacgcccagctaagttttgtatttttaatagagacggggtttca[131 bp omitted]gtttacctacctgctcaactctctaccttgactagaagttaaaccacatgagggcaggtgttttgtccatcttattggtggctggatccccaatacctagaatggtgcttgatatacagtaagtgctcaatatctactggatgaataggcccaggactcgcaccagagtctctgcactgtcacagagggccttgtccccctggactttggaataaacaggacacagggttcagaagcgaagatgggggaagagatcagggttctccaaactgcctttcatgaattgccctaaggcagagtttcctatctttgccactgtgggcatttgaggctgaatcattctctgggctgcgaccatcctgggcactgcagggtgctgagcagcacccctggccttcacccactccatgccaggagcaccccccaagtcatgacaaccaaaaatgtccgcagacattgccagatgcccccagagcatgcaaaatcatccctggtcaaggccactgccctaaagaaatgacttcttggctggacacagtggctcacacttgtaataccagcactttgggaggctgacgtaggaggatcacttgaggttaggagttggagaccaccctggcctccaactctatatggcaacatagcaagaagccatctc[133 bp omitted]gaaaccccatctctactaaaaacacaaaaattagccaggcgtggtggcgggcgcctgtaatcccagctgctcaggaggctgaggcacgagaattgcttgaacctgggaagcagagattgcagtgagcgagtcgagatcacgccactgtactccagcctaggtgacagagcaagactccatctcaaaaaaataaataaataaaagaaatggcttgttgcccacctttctgcctccccgcctgccaaatacatccacagcacttgtgggaagatccgtctgagaccatggattccaggctgggctgatgccggcacgcaggaggcctcgcgcaagacggctggtcccagccagacccagaaaaattagattaactcggagaagctcgccaagacgatccgtcaggccgcctgaaggacagcgtattgatttccacgttgcgaaaaaattaaatgatatccctttttgttatttaaaacgctgcttaagcaattccctaatggaacggcccggcccgggtccaggaactccctggcccggccggcagcgtctccggatcgggtggaggacgagggaatgcggacacggccctgtcttcccctccgggtaattgatgacctcaggagaacagctccattttgcctgcatgcaacgtgcacagttctgatttattaaagacataacaattatgaaaatagctgatttataatcaactcgcccggaccctaattgatttccagggtgaaatttagaaggggaggtattgacaccttgaggacagggcgagccaccggccttggggatggactgtgatgggtggctggggtggaggggggaggacgggacagggagacagcggcctgaatctagttgggttctttgttgcttcatgagatgggctttctgcccagcgttgctggagagggtcaagccgtaatggttgccaccatttcccagtgacagaggcggtccctggctccagcagaggcaactgtgccacattgcagacaaatcaggctgggcccagtggctcatgcctggaatcccagcactttggaaggccaaggcaggaggattgcttgaggccagggttcgagaccagcctgggcaacacagcaagactccggtctctattaaaataaataaagtaataatttttttttttgagatggagtgtcgctctgtcgcccaggctgaagtgcagtggcgccatctcggctcactgcaacctccgcctcccaggttcacgccattcccccacctcagcctcccgagtagctgggactacaggggcctgccaccaagcctggctaatttttttgtatttttagtagagacggggttccaccgtgttagccaggatggtcccaatctcctgaccttgtgatccacccgcctcagcctcccaaggtgctgggattacaggcgtgagccaccgtgcccggccaagtaataatttaaaaaaaaaaaaacaaatcttccagcactctgttgggaaatctcaacattgtcctcatagcagccaggacaacctgatactgttgatacaaatgagtctgccccacaatgtccagaaccttctatctctccagagcctcatgctccggttgccagatgtggccaataaaaatacaggttgccagccaggcacggtggctcatgcctgtaatcccagcactttgggaggctgaggcaggtggatcacttgaggtcagaggtcaggagttcaagaccagccgggccaacatggtgaaaccctgcctttactaaaaatacaaaaattagccgggcatggtggtgtgtgcttgtaatcccagctgctcaggaggctgaggcaggagaattgcttaaacccaggaggtggaggttgcattgagccaagatcgcaccattgcacaccagcctgggcgacagagtgagactccgtctgaaagaaaaaaaaaaaaatacagaatgccgggttcaatctgagtttcagccaaacaacaagtgagtttttagtataagtatagcccatgcaatatttggggtatactcagactttttttttttttttcttaaaaaagtattttctgtttatttgaaattcaagttgaactgggtgtcctgtatcttacctcacaatccttctgtgacgggcaggactccagctcccaacagcccgtaagggacgagactgactcccattcacctgatgggaaaattgaggcaagaggggtcgggcacggtggctcacgcctgtaatcccagctcttagggaggctgaggcaggtggatcacaaggtcaggagatcaagaccatcctggctaacacagtgaaaacacgtctttactaaaaatacaaaaaaaaaaaaaaattagccaggcttggtggcgggcacctgtagtcccagctactcgggaggctgaggcaggaaaatggcgtgaacctgggaggtagaacttgcagtgagccaaggttgcgccactgcactccagcctgggcaacagagcgagactccatctcaaaaaaaaaaaaaaaaggaaaaagaaaaaaaaaaagaaacagaaacagggctttgtgtctctggacctcggtctccacactgcacaatgggtgtgatggtggcccctccatcacgcggtgctcaggctgaggaaatgatttgtggatacccaccagcccatgagcactcgattcttgggtctccccagtgccaacaaagagagagacagaggcaaagacagagagacaaagagagagacaagagagagggatctgggctggttccggaagggcgagccccctttgcggatggggtggcccaggagggtgggaattcagtttgcaaatcagaaggttccagacttttctgtaaggcagggagacagctaaagaggagcctgcaggccgggcgcggtggctcatgcctgtaatcccgacacattgagattgggatctgaccaaggtgggtggatcatttgaagtcaggagtttgagactaacccgaccaacatggtgaaaacccatctctactaaaaatgcaaaaaattagccaggcgtggtggtgcatgcctgtaatcccagctattcaggaggctgaagca[137 bp omitted]gagcctgtaggatgcagagacccagagcacctacccacagctgccaacgcccagtccccaagatggccctgctgagcagttttaagtattgttaaagataaaataatttttccttctctgagccatctgattgacgtggtaatgggccccgcagacagggagaaggtcaggttgcaatgtaatcagttttttctagagtgacgtataatcatgatagcagtgcacctggaaaagggggagggacctgcgacagtccccagaccctctgagctctccgttgcaggacacgacagggccacaaggacggtgggacccagggaggcttcctggaggaggcgtagctgcagctgggattggaaggacatggcatcacaaatgcaaagttgtggaggttggaactgtctctttgtgcctcttcctgatcccactagatcttactctccaggggagaatccaattcccacctttcccagcgtctagagacatccgcatcccttggctcagggccccctcctccaccttcacagccagcagtggctggtctagtccttctttggtttttttgtttgtttgtttgtttgagacagagtctcaccctgtaaggcaggaagacagctaaagaggagcctgcaggccgggcgcggtggctcatgcctgtaatcccgacactttgagattgggatccggccgaggtgggtggatcatttgaagtcaggagtttgagaccagcccgactaacatggtgaaaccccgtctctactaaaaatgcaaaaaattagccggacgtggtggtacatgtctgtaatcccagctattcaggaggctgaagcaggagaatctcttgaacctgagaggtggaggtggagcccaggctggagtgcagtggcgccatctctgctaactgcaacctctgcctcccgggttcaagtgattctcctgcctcagcctcccgagtagctgagattacaggcgcccgtcaccacacctggctaatttttgtatttttagtagagatggggtttcaccatgttggccaggctggccttgaactcctgacctcaagtgatcctcccgcctcggcctcccaaaatgctgggattacaggcgtgagctaccgcgcccggccaggcctggtccttcctgtgttgctatctgattctctctcttctgcctctgtcttccactttaaaagacccttgcgatgatttgggcccaccaggtactccagaataatatctttctctctcatcactagctgcctggcaaccttcattccacctgcaaccctaattctcctttgccattgaatcacattcatggggtctaagattaggatgtggacatctttgggggatcattattctgccaactacaacagctgacttgaaccaccaggcagacagcaccacgtcctacagcttgttctgtggcccaggctggagtgtagtggtgcgatcttggctcactgccgcctccacctcccgggttcaagcgattatcctgtctcagcctcccaagtagccgcgattacaggcgtgtgttaccatgcctggccaatttttgcatttttagtagagacagggtttcaccatgttggccaggctggtcttgaactcctgacctcaagtgatccacccgccttggcctcccaaagtgctgggattataggtgtgagccaccgcgcccggccactaattaggttttttgtttttgttttttgttttttctgtttttttgttttttgttttttgtttttgagacagagtctcactctgtcgcccaggctggagtgcagtggtgcgatgtcggctcactgcaagctccgcctcccgggttcatgccattctcctgcctcaccctcctgagtaaccggaactacaggcatgagccactgcgcctggcccggtttttttgtattttttgtagacagggtttcaccatgttgcccaggctggtcttgaactcctgagctcaagcgatcctcccaacttggcctcccaaagtgctgagattatgcactttcatgcattgggcattgattacaccctgagcgtggagtcatacacttgaccctctttgcctccccagctcctcctcacaggctccaccagggaagaaaataccactgtacctaatgcactgatcaaaacattgagactcagtgactgaacaacttgccaatgatccctcttgctccataaattccgaagttggaatttaaatgtatgcacatgtgatcgcaaagcccgtggatcttttttttgtatttgtatttgtatttttgtatttgtaactacttgtgatttgtataattactattatggttgtatggctactatccttcactgagcacctatttgttgatcagtctccagaattcacgccctagctgactcctctggaaaagcattttacaaaggagagagctcagagaggttgaagggcgtgtccaaggtcacccagtgggcggcagagctagaatttgaacccaagttcccctggctgccgtccactgccttccctgcctctgggaagaaaccagggctttgcggatgatctacagaggccactcatcgagaccctgctcgggttatttggcggtttcaggggctcagcacgctttttttttcttttcggcagaggctggtggcggtccgggaagatgagccaagtgctgagtctgcaatgcgaagtgtctctgcaaaagccaccagccacgtggccacagaggcccagggctgtgcagatgatcaatgtcgccccatccgtcgctctgccatcctctcacctccgcctcggcgtcctttatccctcccactccgggtcgctctccagcttcctggtgcaaaaagactgagcgacactgcagagcgtcctgaaaatgatggtgcagaaatcgtttaaggactgccgaggtgaggaagggcagcccaggccaccatggagacacgcaaggccgggtgccgtggctcacgcctgaaatcccagcactttgagaggccgaagtgggaggattgcttgagctcaggagttcgaggccagcccgggcagcatagccagacccatgttcctacaaaaaaactagcagggcacggtggcctgcacctgtagtcccagctacttgggaggctgaggcaggagaattgcttgagcttgggaggctaaggctgcaatgagctgtgatcgtcctactgcactccagcctaggcaacagagcgagaccctgtctcaagaaaagaaggaaggtttgggatgccaaggcaggtggattgcctgaggtcaggagttcaagaccagcctggccaacatggtgaaaccccgtatctactaaaatccaaaaattagctgggcgtggtggtgcatgcctgtagttccagctactagggaggctgaggcaggagaatggcgtgaacctgggaggtggagcttgcagtgagtcgagattgggccactgcactccagcctgggcgacagagtgagactccgtctcaaaaaaaaaaaaaaaaaaaagaaagaaaatacaaaattagcggggtatggtggcacatgcctgtaatcccagctactcgggaggctgagggaggagaatggcttgaatgtgggaggtagaggttgtagtgagccgagattgcggcattgcactccagcctgggcaacaagagtgaaactctgtctcaaaaaaaaaaaaaaaaaaatagagagagagcagatgaggacacagacacacacagagggaagacaatgtgaggacacaggaaaaatgtggccattgaaaagccaagaagagagacctcagaagagatcagccctgtcaacaccttgtctcaggtgtcttccagcctccagagttgtgagacaacacatttctattgtttaagccaaccagcctttgtacttctttttggcagccctaacaaactcatatagtgcccacgagaccacctttaccagctcttcaatagccaggactctaaaagtcacaaaaacaaagaacaaacagaaacacttgatttcaattgacttcagcaaaaagggagctattgtaaataatagtatgccttcaggcacggtttgatccaggtgctgaagccatgtcaagaccatctgctttcttctgaattaacttcattcacaggaggcttttccacgtggtgatcagatgggtcctaggaggacaaggcatttatcagctcagcaacccctgaggaaaatgtgtcttcttaccccacagcaggacttcacccacaagtccaccaaatatttaggagttctctctgattgggacaacatgggtcatggccctgagataatcactgaggccagaggtgtagcatcctctgattggccagccctgggtatctttgattggacctccctagaaagagactttaaggcaaggatttgtggggc[142 bp omitted]ctttactaaaaatacaaaaattagccggatgtggtggtgcgtgcctgtaatcccagctacttgggaggctgaggcaggagaatcacttgaacctgggaggcagaagttgtggtgagccgagatcatgccattgcactccagcaaaactccatctcaaaaaaaaaaaaaaaaaaaaaaaaaaaagcattccaggaatcactgggaggggagaggaaagtgagacaagggagggaaagagccaacacaaggggtgttaatgagcaggtgaatgtgcgggaaactggggctcggtcccactgggaacctctgggaggtacagaacctgcttggagttatcccaacagatgggtcagggagctgaagtattgatccacccactccccatctgtaaaggtggaaagctgcattagctctcctgccctctggcctggcttgcacaggaccaaatggcctccaacagccagcaggacaccatcagacaggagatgtcacaggtgttagcagtatacagccttcgcatgcaaaggtgacctcaaggccaggtgtggtggctcacgcttgtaatcccagcactttgggaggccaaggtgggctaatcacctgaggtcaggagttcaagatcagcctggccaacatggcaaaaccccatctctactaaaaatacaaaaaaattagcttggtgtggtggtgggcactgtaatccagctacttgccaggagaatcacttgaacccaggaggcagaggttgcagtgagctgagatcatgccactgcattccagcctgggtgacagagcaggactcagccttaaaaaaaaaaaaaaaaaaaaaaagtgacctcacgatcataggggtagggttgcactgggtcacagcctccctccctggttcccaggttgaagctgaccctgcctggacttcaggaaccaaaagcaagacagggaagttcctcccagaaaaatctaaggtgctgttcctgaaaaaggaagggtgcaatggtcttactagagtcacttctccttaattattcccatggataccatatgtgcccactgggtgcctcttgacattgccctcaagttgtccatgaccctgagcaccttctcagtctatagggccgatcaccctttccaacatcacacagagagaggaccagatggtacgatggatgacaccaaggctgctgttatttctgtggctgccacaaggtgttgctgttgaacaatagtcttgcacagtctgttgcctccttttccctttgcactggccccagtggaaccccaactgaggtccgcaaggttagagtcctttgatttacattcttgaatgacttcaggccccaatcaccaagctagacacaataacagggaaagtgaaggaggtagaacttccagacacatgttgcgttcaaaaccaggttttcctccgttctcctcctctgtcccccttgagactaagttcccacgtgacagcactaggcttccttttctgccttcaggtgtccctcggggccactcctgcccatcagagagaacctcagaagcaaaagaaactggattgcaattcctttgctccggtgaatcccacttcaacaccactagtcagctctgcacacgaaggagtttgaggaacggcagcctttgtccaagtactggtattcattacctattactgtgcaacagattatcacaaacatagcagcttgaaataactcatttattatctcacagtttctggaagtcacgcatccagaaacaacttagctggtcctctgttccagggttttcccaaacagctacaatcaagatgttacctggggccaccgacatctcaaggtcaccagagaaagatctgcttccaagttcaagtggccttgctcgcggctgctctttgttcttcttcctcttctctcttcttcttcctcttcctcttctcttcttctccttcttcttcttcttctccttcttcttcgacagcctcttagtttgttacccaggctggagtacagcagcatgatctcagctcactgcagcctcaacctctccagctcaagcaatcctcctgcctcagcctcccaagtagatggggactggaggcgcacaccaccatacccagctaattttttctatatacatatttttagggacagggtcttgctatgttgcccaggctgctcttgagttcctgggctcgagcagtgctcccacctcagcctcccacagtgctggggttacaggtgtgaacctctgtgtccagcctgatggttgcttcttctcactctcttgcagtcccacttctatgggaataacctcaggctggtctttcagaaatcagagggcccatggaagagagcccagttatcccagccaaccccctaacaagaaaggaagcccaaccaagatcagcagagctgcctatccaaccccaagttcactgcaaattcactgcagagacaggaatgagcccacttgagactggaagagtcagatggttttatctgtagacttacgaacacaaataaatgcttaggccaggagctgtggcttacacctggaatcccagcactttgggaggctgcagcaagaggatcacttgaggccaggagttcaggaccagcctggccaacatagtgaggtgccagctctacaaaaaaaaaaaaaaaaaattaggaaaaaattacctgggtgtggtggcgcacctgtagtcccagctacttggaagcagaggtaggaggattacttgaacctcagaggttgaggctgaagtgagccatgattgcaccactgcactccagcctgggcgacaaagtgagaccccaactccacactctctctcacacacacacacacacacacacacacacacacacacacacaaataagataaaataaaaacgcttagtgcttgaagtcattggctgcagggctacttgttacgtacgcagcagtagctgactgatccaaccagcaatagcgtcatcatcaccatcccccacaatgggcacccacttgccttcaatatgaataaaactaagaggaatcattcaactgattctctctaaataaagaagttctgcttcaaggagcttagctgtctccactgtacaaaggaaaggtggccggcagcgtctgctgattaaaaaatgttaagttccacttcaccaggcatcccaataccctcattttccatccaccctccctggaaggttgagaagccagggagtgctcttccaggcttgcagaccgggtcacagattggccaggggcattcaggaccctttggctgccatgaacaggacccctccctgccatccaagtcccagctgcttgcagctacggaggctccctagctcttctatccaacgaactcgagaccttcttatggtcaggcatggtggctcaggcctctaatcccagcactttgggagaccaaggtgggaggaatacttgagcccaggaattcaagaacagcctgggcaatatagcaagaccccatctctatacaaaatttaaaaataaaaaatgccctgggcacagtggtgcatgcccgtagtcccaggtactcaggaggctgaggcatgaggattgtctgtgctcagaaggtcgaggctgcagtgagctatgattgcaatactgcattccagcgtgggtgacagtgagaccctgtctcgaaaaagaaagaaagaaagaaagagagagagagcgagccaggtgtggtggctcacgcctgtaatcccagcactctgggaggccaaggcaggcggatcacaaggtcaggagatcgagaccatcctggctaacacggtgaaaccccatctctactaaaaatacaaaaaattagccaggtgtgctggcgggcacctgtagtcccaactacttgggaggctgaggcaggagaatggcgtgaacccggaaggcggagcttgcagcgagattgctccactgcattccagcctgggtgacagagcaagactctgtctcaaaaaaaaaaaaaaaaaggaagaaaaagaaagagagaagaaaagaaagaaagagagagagagaaagaaagaaaggaggaaggaagaaaggaaggaaggaaggaaaggttctcaagacgggcagtaaattttagtagaaaatggcaggactggcttcagaaaggctcacactctcagtgtcagtcgatcaggaacaagatggcttgtgttttgccttgaccatggcctagtgcttggcaatgtccagaattctttttttttttttttttttttaagatggaatctcactctgtcactcaggctgaagtgcagtggcacaatctcagctcaatgcaacctccacctcccagattcaagtgattctcctgcctcagcctcccaagtagctgggattacagacatgcaccaccacgcccagctaatatttgtgtggtatttttgtttgtttgttatgttgtttgtttgtttgtttttgcttttttttcagtagagacagcgtttcaccatattggccaggctgggtcctgacctcaggtgatccacccacctcgacctcccaaagtgctggaatgacaggcatgagccaccacactcagccatgtccaggaattcttgataagcagctctggctacaggcaccaacttgcacctgccaggaccttccctataagccctggacctccccaaggtccgggcactaacagggctgctgggacctgcttcagaacactcattctcactggtcaatgccacaagttgtatctgtagctaatttgcttttaagagatggggtcttgctatgttgccaaggtcggatgcgaactcctgacctcaagcaatcctcccacctcagccttccaggtgctgagattacgagcatgaaccatcatgcctggactctctaaattttttgtctgagagagtcttactctgtcatccaggctggagtgcggtagtgcaatcacagctcactgcagcctcgacttcccaggctcaagcaatcctcttacctcggtttcccaagtagctggaaccacaggtgcacaccaccacaaccagctaactagaaaaatgtttttagagacagggccttgctatgttgcccaggcttctaaatattttttatcatcactctggaaagcaagagttcttggccaaatagcttagtagttaagaatgtaagctcggctgggcgcggtg[131 bp omitted]tggcgggtgcctgtagtcccagctactcgggaggctgaggcaggagaatggcgtgaacccaggaggcagagcttgcagtgagcggagatcatgccactgcactccagcctgggtgacagagcaagactccatctcaaaaaaaaaaaaaaaaaagaatgtaagctctaggccaggtgcagtggctcacacctgtaatcccagtactttgggaggccaagacaagagaatcacttgaggccaggaggccaaggctgcagtgagccatgtttacactactgcactccagcctggacgacagagcaagaccttgtctcaaaaaaaaaaaaaagtaaataaaatatatatgtatgtttcactgtatttgtagaaattataggaagagtcacaagaaattaatagaattctctcatagtgggaaggtagaagctgagtggaaaacaagagagccaggcatagtgattcatgcatgaagtccttgggaggctgaggcaagaggatcatctttgaaaacaaaagacagcttagactgctcctgagccaggtggagctgcggcatacccctgagtgtcgccaatcaaagatagcctacatcagcccaaccccaaccagatcccagacacaggagcaataacacataactgtaagccagggagttttagtttggcttgttacgcagcagtagctaaccattacacttccaaaagataacactgtcatgaaccccattttatagatgaggaaatggaggctcacgttcattctcactggtcagtgccacatgctgtatctgtggctaatttgttgtggctttttgtttttgttccttttaacacagagtctcattctgttgcccaggctaaagtgcagtggcacagtcttgctcacttcaacctctgcctcatgggttcaagtgattctcgtgcctcagcctcccaaatagcttcaggggaagcctgaagtttcccagctaatgagtgataaagccaggattcaatctcagatgcccaaattcttaatcattctgtatcctgccccttaatcattctgtatgctgtctccctccaggctaagccattccttctgagtctctcctgcccaagtctttacctttgaaaggaatcacaggctcatagagacagaaagtaggatgggtggagggtagcagaggctggggagggggaggggagtgagtgtttcatggggaagaatttgagtctgggaagatgagaagattctggagatgaagggtagcaatggttgcacaacattgtgaatgtacctaatgccactgaattgtatactttcaaatgggttaaggccatgcacgcctataatcccaacgctttgagaggccaaggagggaggatcacttgagcccaggagcttgagatcaccctgggaaacatagcaagactttctctacaaaaaatacaaaaatcagccaggcacggtggtgcacacctgtagtcccagctactcgggaggctgaggcaggaggatcacttgaacccgggagtttgagactgcagtgagccgtgctcgcaccactgcactccagcccaggcgacagagtaagaacttgtctcagaaaccaaaaagggagttaaaatggtaaattttatgttatttctattttgcctcaatttttttttttttttgagacaaagtttcactcttgtcacccaggctggggtgtaatggcatgatctcggctcacggcaacctctgcctcctgggttcaagcaattcttctgcttcagcctccagagtagctgggattacaggcgcccgccaccacgcctggctagtttttgtagttttggtaga[134 bp omitted]gggagaggcagaaggaaggtttcagccttcctcacttggtgacctcactttgtgcttctcacacttcacctcttcacaataggcctagacgcagtgccagggaccggttttgagaaattgagacccagagagggtggagaattgtccaagactacacagcaagttgaaggcactgccagaacttagacttcatctacaaagtcaaactcggcctgaacgaataagacaaccccaggatccctctccagggagtgagcgattttgcttaagctcctggtggcagggggaaggagaaaggcaaggaagcaatttttctgttgcctgagccctgagaatttcctccctggggagaggcactcgctggtgaggacgtgtccgtgaagcctccaatcacaagattaggtgatttcattactgtctgaaaagctgccgggatggggacggtttgagcttacaaataatcacccccgatgcagggtgctgaagatatcacagatcccagaggctgctccggtggtggggcccgagttgtcagcacgtggggagaggggctctggagtcagagaaagagaagaacctgtccaaggtcgcacggcaaaaagggacaagagactcccctacagccaccagagcacttgtggttaaacctgagacaggtgccctccctcctctgcccacaacattccatggctcccaccttcctcagggtaaaagcctaagttatctcacaaagcccttggccgggcacggtggctcacacctgtaatcccagcactttgggaagccaaggcgggcggatcacaaggttaggagatcgagtccatcctggctaacacggtgaaaccccatctctactaaaaatacaaaaaaaacagccaggcgtagtggcgggtgcctgtagtcctagctactcgggaggctgaggcagaagaatggcatgaacccgggaggcggagcttgcagtgagccgagattgcactactgcactccagcctgagcgacagagtgagactctgcctcaaaaaaaaaaaaaaagccctgcatgacctgcccgctaccccctcatcgcctcagtgcactctcctcttccctctctccccatccctccctccacactgtccgtgtggcttcagccacataggtctcctcgctgttcctccaacgtgtcaggcacagtcctaccccagggcctttgcagaggctgttccctctgcctggaactctcttcccccacatccgtcacttaaaccaacgcattttcctccatcctattcccaggcttccatcttcacccccacgacctgtcctctctttggcagccagagggcgcctgtgagcccctgagtcaggtcctgtccctcttctgtccacagccctccatagctcccacttccctggacgtaaaagcccaagtcctcccagcagcccacaaaggcctgcatgatttgccccgtcccctccctgcctccccttcctccctctctcccactcttcactccgtcccagtccctgacactcaaaaaaagaaaacaacaacaaaaacaaacgaaaacaaaaatggggactttgcacacacctaggatctgaaaggaattttcagtgcatagcccatgcctggactcctccctgagtgaggagctcactgcctcccaacagctgtccttttatctatgagctgtgccggccatgagccaggtcagcctctgcaaaatctgggctgagtgtgaagtgcatgtgtggagggaaggggttaaaatgaggtcaggggcctggcacggtggctcacgcctgtaatcccaacactttgggagtctgaggcaggtggatcacctgaggtcaggagaccagcctggccaacatggtgaaaccccgtctctaccaaaaatacaaaaaatgagccgggcatggtggcgggtgcctgtaattccagctacttgggagcctgaggcaggagaattgttgaacccgggaggcggaggttgcagtgagttgagatcacgccactgcactccagcctgggcaatagagcaagattctgtctcaaaaacaaaagaggtcaggatcttagcagggaggctgctgttttgcataggttggaagtccccctgaggccacgggagcttgattaatccagaccctcccttctctgtctttgtctctctctttctgacagtctctccctctctttctcccttggtttgtgtctgtctgcttctgtctctcccctcttctctctcacctctgtgtttctgtctctgggtgtccatgctgttaaaagtcatacagatatgagacagcgttcaaccccaactgaaaattgccagccaccccagcagtggaataattgaatcggcgggcagcaggactgaatcaagtgagggtggaagggggcacattcccagctaaaagtggggccctcgttagggggatgcagtttgctgttggtagcaggaacatgagtttgcagggtggcgaggggggagtgaactcccactggcaggcctggctccccaggcttccctgctgaagacaagctgagtcctgcagagagaggctgaggcctgagtcgcatctatccgccccctcccccaacttcaacacatggagtctgcttaatgctccgagccacttgacaggccccagttgagggtttcaccaggatccacagccagccaagcccagctcatcaaagtggggctccattctccatcatccgaccattcacgtatctgccttctccatcacggatccatccttcacccatccagccaacacctacccatccatccttccttccatttcccaaacccccatacactcacccatatacccgcccacccattccccatcgtccgccttccatcccccaaccttcatatcccatccccctttcactcacctacacacccacccatatacccacccctacaatccccattcactcatctaccctttcctccaccatctacctacaggcctatccatccttacctccactcaaccacctacccaaaaaccatccatccatccacccatccatccactcaccatccattcatccactcatccatccatcaacccagccatccacctgtccatcaacacacccaaccattcactcatccatccatcatccatccattcacccatccacccaccacccacccatccatccatgcagctatccatccatccatccatccatccatccatctatccatccatccatccatgcacccattcacctatccacctacccatccatttatccattcatgcatgcatctacccatctatccatccatccattcatccatttatccatccatccatttatccatccatccatttatccatccatccatccatccatccatttatccatccatccatttatccatccatccatccatccttccatccatccatccatccatccgcccacctacccatccactcatccattcaccacccacccacctaaccatctactcatttatccacccatccatccatttatccatccatccttccatccatccatccatccatccatccacccacctacccatccattcatccattcaccacccacccacctaaccatctactcatttatccacccatccacccatccatccatccatcacacactcattcatccacccatccatctatccattcatacacacgcacacacacacacacacacacacacacacacacaccctcccatcccccacccatccacctttcatcccctatccctccatctcccatcccctattcaaccatccctccactcacctttcatccatctgcccatccatcctcccctccctcaccccacatttcccacccacccatccatccacccatacacacacacccacacacccattgattcattattcagcaaacgttaggctcttgctgagtgcccatatctacactgggtactgaagatacgggaattaaaacagccgaggcccctgctcgattggagattagcacctagttgggaagataaatgttaagcaaaccccggcacacacaacttcattgtagaaattgtggtggttccttggggagacactcaggccgctctgagatgggcaatgctgggaggggttcgggtaggttggggggcatgggagagctctgagggggaagggtgtggcaggcagagggagcagcatatgcaaaggagaggcagatggaactgcccctggggagggaacctggacaaggagtgggtttggggagaagttgctgctgccagattgggtgctgctgtgtgtgagaagcctgaggggaagataggcagcagccagccacagggggtggccagagggcaatggagaggagaagggatggccagagagatgggagggaaaccaggatgggtggggtcctaaagcctaggggaggggctgggaatgatcgacgatcacttccccttgctcagatggagaatttgacgtccagggatctgcatggacctgtctcccagtcaagattctgaccaacatctccctgggagaggcagaggctgcagtgagctcagatcacgccactgcgctccagcctgggtgacagaacgagaccgtgtctcaaaaaaaaaaaaactccctgggaggaccatggaaggagtgcccttctgtaggtggtttctttttattttattttattttattttattttttggcagttcactgcaacctccctagtagctggacccaagcccagctaattcttgtattttttgtagagatggggtctccctatgttgccctggctggtctcaaactcctggcctcgagcgatcctcccacctcagcctcccaaaatgccaggatgacaggcgtgggccactgtgcccagcccacagctggcttctgatcccagccgggtcggctctggctggggctccctggtcaggccacacatatgacgtaatagcctccctgttctgggctgtgaaatgggaacagttcacccactccatgaggcaatggggaagcaccaagggcaagatgaccacagtaggacactatggagtcctctacaccatgctagcatggcctcttggcccctgcatcattcattcattccttccttccttccttccttccttccttccttccttccttccttccttcgttgaatccgggaggcagaggttgcagtgagccgagatggcgccattgcactccaacctgggctacagagcaagactccgtattgatgaagtgcccaggcaccgttctgggtgttgggaagacagctacgaacaaaacagacccactccctctgtcctcactgatattaaagtagagtgaggctgggtgcggtggctcacatctgtaatcccagaactttggaaggctgaggggggtggatcacttgaggtcaggagtttgaaaccagcctggccaacatggtgaaaccctgtctctactaaaaacacaaagaaaaaaaattagccgggcgttgtggcaggcgcctataatcccagctacttgggaggctgaggcaggagaattgcttgaacccgggaggccgaggttgcagtgagccaagattgtgccactgtactacaccctaggcgacagggtgagactccgtctcaaaataaataaataaaataaaaataaaaatagcgacagagtgagactccgtctcaaaataaataaaataaaataaaaataaaaataaatagagtgagacagataataacacacaaatgcataatctaatttcagggagtgggaggaatcctaaagcaagaagcgaagcacagggcgccacacccttgtaatcccagctactcaggaggctgaggcaaaaggatcatttaaagcccaggagttcgagaccagcctgggcaacaaagggagacctcatctcaaagaattctaaagcaagggaaagcagaaaagaaggacaaaaatagagtaatcagggaaggcttctctgaggaggtgacatatgccctggaaggaaggcagtctggctaagaggtctgaggtaggaccaagtttagcattttaagaattgcttaagaatcaggcacggtggtcacgcctgtaatcccagcactttgggaacccaagacgggtggatcacttgagctcaggagtttgaggccagcctgggcaacatggtgaaaccctgtctctactaaaaatacaaaaattagctggccgggcatggtggcacatgcctgtaatcccagctacttggggggctgaagtgggaggatcgcttgaacctgagaggcaggaggctgcagtgagccaagatcgaaacactgcactccagcctcagtgacagactgagaccctgttgaggaagaaaaaagaagagaaggagaaggaaaagaaagaagaaagaaaaataagaagaagaaaggagaaagaaggaagaagaagaaaaagaatcagctagttttgaggcaagatgatcgcttgagcccaggagtttgagatcagcctgagcaacatggcaagactccatctctattattttttaagtaaataggattttttttaaaaaagattcagctactttcttttgagatggagtctcactctgtcgcccaggctggagtgcagtggtgtgagctcagctcaccgaaacctccgcctcccagattcaatcgattctcctgcctcagcctcccaagtagctgggattacaggcacacaccactacgcccggctaatgtttttgtatttttagtagagacagggtttcaccatgttggccaggctggtcttgaactcctgaactggagtgatccgcccacctcggcctcccaaagtgctgggattacagatgtgagccaccacatccagcctagaatcagctactctttgtggctggaactgtgggagggaggaagggagagaggggtccacactgcctggagcctaccctggcacttcccgtcccccttcctggcttacttctccgttatgattcaggctctgtgacatgctatacatttttctttttttttttttttgagacggagtctcactctgtcacccaggctagagtgcagtggcgtgatctccgcttactgcaacctctgcctcccgggttcaagcgattctcctgtctcag[135 bp omitted]gcctcccaaagtgtttggattacaggcgtgagccaccgcgtccagcctacatttttcttatttacgttgcctgctttctctcccctagactgctggctccgtaatgatgggacttctttccttcaggcctgcttgttccttgctttgccttcagaaactaaaacagtgtctgaaaatgtctaaatgaatgaatggacaaatgaacaggcatccttctcatcagaaggatggggtgggagggtaatcagcctctggccacttcaagaggcccctttaggaggtcagagctaagaggtacagggtcagggccccccttgattactgagattctaattaactctggggccgagagggccgctccgctctgaggaattatagataagtttgcaccccagtgtttgagcagtggctctgtggggggcgggcggcagctctccctcccctgccctcccacccacagccagctggccagggaggcgggcacagagagaggtcatttgcataggcaggtaattggttttgcaaataaatctggttcttgaaatttgtagattagtaataatacgtctccagatgagagagaaaggtcacggatgaataaaacaacaattaaactttcaggagattattaaactaaacagaaacctggcatggggtggccgagggaataaggagctgggctgggaaggtgggggtgatgggagtgggggcatctgctgcctccgctcccgctcccagatcctgcttgccagggtctgggcagagtagaacgccccgtgatcctcccagaatagcttttaggattcccatttctcagtctagaaaactgaggttgaagaaggaagaggaagaggccctaggtcacccagtgaggccacaccccaggcaggagctgaacccaagcccattagctttgcgctgtcctgggtggcagagaacctcatattggcaaagggatgggcgcaatggctcacacctgtaatcaaaacactgtgggagaccaaggcgggagccgtgcttgaagccagcagttcgagaccggccttggcaacatggtgagaccctgtctttacaaaataataatataggcaagggaatgagatgtaagaaa[146 bp omitted]accccgtctctactaaaaattcaaaaaaattagccgggtgtgatggcacacgcctgtaatcccagctactggggaggctgagacatgacaatctcttgaacctgggaggcagaggttgcagtgagccaacatcacaccactgcactccagcctgggtgacagagtgagactctatcacaaaacaaaacaaaacaaaacaaaaaagcaggcaaagggttcgattcccctctctgcacttcttggctgtgtgaccaggacaattccattctcccgctgtgcctcagtccttccatgcctatgaaattgaggcgaagcattttatgtgtgatgttaaatttgcaaatgttattatacttgcgtggcaattcaatgtgacacagcagctaatggaccgggcaccgtgcctggcatggtgtaggtggctgctttgggcatgctgggtccttggctgcaagcaacagaaatgtgctccaggaaacaaaagcagaaccaaaatgtataggtaactcggggtggaaggcaagggtgaagaaagacgtcagccaatagggagaaactgaggaaaggcgccaggtaacagccatctttcggccgccctctggcatgtaaccttgggtgagtcacctttccccttgagacctcagtctccatagctctaaaagagggaatagttgtgtctactttgcttattcagtttcatcattcaaaatattgactgagccccaaggccgggcgcggtggctcactcctgtaatcccagcactttgggaggcc[133 bp omitted]gaggcaggagaatggcttgaacctgggaggcggaggttgcagtaagccgagatcacagtgttgcactccagcctgggcgacagaatgagactccgtctcaaaaaaaaaattgactgagcccctaatgagttccaagcattgttccaggcactgaagatgcagcagagaacaaaacaggcagaaatttctgtcttggaagcgctggcagcctagttgggcagaca[143 bp omitted]tgaaaccccgtctctactcaaaatataaaattagctgggcatggtggtgggcacctataatcccagctacttgggaggctgaggcaggagaatcgcttgaacccaggaggtggaggttgcagtgagccaagactgtgccaccgcactccagcctgggcaacagagcgagactccatctcaaaaatatatatatatatatacacacgtgtgtgtgtatatatatacacgtgtgtatatatatatatatatacacacgtgtatatatatatacacacatatatgtgtatatatatatacgtgtatatatatatacacgtgtatatatacatgtgtgtatgtgcgtatatatatacaggtgtgtatatatatgtgtatatatgtatatatatgtatatatgtgtatatatgtatatatgtatacatatatgtatacacacacacacacacacacacacacacacacacatatatatatatatatacactgagcccctaatgagtgccaagcattgttctaggcactgaagacgcaccaaagaaggcagaaatttctttttttttttttttttgagatggagtcttgctctgtcacccaggctagagtgcagttgtgcgatttcagttcactgccagctccgcctcccaggttcacgccattctcctgcctc[222 bp omitted]gttgggcagacagacaatgagcaaataaatccagaaaatctgtagggttttagagcatgctaagtgctgtgaagaaaatcagagcatggaaagtatcaggaagggacaagaattggaaagggagggcaggttgcaatttttttttaagagatggcgtctctctctgttgcccaggatggagttcagtggtgcaatcacagctcactgcagtcttgatttcctgggctcaagccatcctcccacctcagactcttgagtagctgggactacaggcgcacgccaccacacctggctaattttttttttgagacggagtctcactctgtcgcccaagctggagtgcagtggcatgatctcaactcagcgcaacctctgcctcccagattcaagcaattctcctgcctcagcctcctgagcagctgggatttacaggcacaatttttgtatttttagtagagtcagtgttttgtcatgtcggccaggctggtcttgaactcctgacctcaaatgatccacctgccttggcctcccaaagtgctgggattacagacatgagccaccatgcccggcctaatttttattttttattttgtagagatagagtctcactatgttgcccaggctggccgcaaactcctgaactccagtgatcctcccagttgcaattttaaacagggtcatcagggaggccctactgagaagaagatttagaccagagacctgaaggagaggaagaagggaaccaaagagagatctagggtaaaagcattcctggcaggaagaacagcctgtgcaaaggccctgaggcaggactatgcctggtgtgttggaggaacagtgaggaggcccatgtggctggggcagagccaagcaagaggcagaggggaaggagatgaggtcagggaaatgatggagggtagattgcgcagggccttggaaatgacaaagaagactttggcttatgccctgagatggaagcctcacgttctcactttagcatctccctgaggtagtcactaaaatggtgaagagtgtccactcctttttcccaacccattcaatggcagagattgtgggttggcctctaacatccattccccactttctcctttacaaatgaaacctgcccagctaaagactgtgttgcccggcctctcttgcaggtcagtgtgactgtctgacatattgtgaacaacgggacagaagcaggtgtaacctcagaagaaaataacaggccttcttcttcctcttcccccactgccccccacctgtgtctggaaggtggccaccatcacaggggccggagtagccactgtggtccacaagatagaagttgggggctgaggaggcagagcaacaagaccgaaggagccctgggtccctggtgattgtggagcctctgctgcagcctgggttgatgcccaggttatgaggacaggagtgatgagtgtcacccttgtttaagccatggtcttatgggtttctggcaacatagatcatgaataatcaaaagttgttgttttttttttcgagacggagtctcactctgtcacccaggctggagtgcagtggtgtgatctccactcactgcaagctctgcctcctgggttcacaccagtctcctgcctcagcctcatgagtagcttggactacaggtgcccaccaccacacccggctaatttttggtattctttagtagagatggggtttcaccatgttagccaggatggtcttgatctcctgacctcatgatccacccgccttggcctcccaaagtgctgggattacaggtgcgagccactgcgcccagctgaataatcaaaagttttgagcactctcactgcccctattgcagatttcagagtttttgttgttgttgttgttttggagacagggtcttgctctgttgccaggctggagtgcggtggttccatcacaagctcactgcagcctcgacctcacaggctcaagtgatcctcccactcagccttctgagtagctgggattacaggtttgagccacctttgatttttttttgtggagatggggtgtcgttctgttacccaggctggagtgcagtggtgccatcatagctcactgcagccttgacctcccaggcttaagtgattccccaacctccacctcctgagtagctgggactacaggcatgcaccaccacacctggctaatttttaaattttttgaagcagttagcggggggtctcactgtgttgcccaggctgatcctgaactcctggactcaagcgatcctcccgcctcaccctcccaaagtgatgcgaatacaggcatgaaccaccatgcccagccttccagacttttgctcttccgtgctaacactcccctgatgcaaaacgcccatcctctctcctctcctcctcccaatcttcctttggctcttggcctcgttcctccaaccttgctgcaaccaagctgtaccatgctacaagctccaccttgtggccagcctggtaactgaccttggctctcctcttcctgatgctgtccacttagtttttttccaagacttagttttattccaagatatgttcagggacatccatcctcccctacattccttcatcttcatatctccctccctctctcttccaaatttgcagttcctctagaaccaagctgggtcctttcaacccctatgttgtgcatttgtggtgattctgtaaggcagaaaggggaccagagagggtgaatgggctggctgggtcacacagccaagccatcctctccagaggaagctgaagagtgagcctggtcaagagaggatacaggctgggcatggtggttcacatctgtaatcccagcactgtgagaggccaaggcaggcgattacttgagcccaggagttcgagaccagcctaggcaacatcatctctacaaaagataaaaaaattagccaggtatggtggcgggtgcctgtaatcccagctacctaggaggctgaggtgggaggatcgcttgaggccaggaagtggaggctgtggtcagctaatattgtgccaggtatatatatatacctgggcatggtggtgcacatctgtaatcccagcaactctggaggctgaggcacaagaatcgcttgaacctgggaggcagaggttgcagtgaactgaggtcactccactgccctctggcctgggtgacagagcaagacactgtttcaaaaaaaaaaaaaaaaaaaaaaaaaaaaaaagaagattgatgacagagaccatgaaccttctggtctgaggacacaggacagcggggaccctcagacacagggccccccattagtcttccaggaaatccttctatcaaagctcaatgatctcattccttcctttgttccacaaacacttattgagcaactgctgtgtaccaagtcctatttggggtgctggaagcaaaacacacttgccctcttcctcccaggctagtgtgggaagcatgggtgaggtcagactgtgatgaaggcacccagaggaggcccctgacctgggccttgggcttcccagaggaggtgacgtggaggctgagatgtgaaagatgaagaggagaaagtagcatggtccatgctgagggaacggcaggagcagaggctccgaggtggggtggggtgggtttgagcccctaagaggcagccagttgtaatagaggccaacggcctgcagagctgggggcgagagcagggccttgatctcaagggcaatagggagccaaggaaggatttagagcaagggaggagtgagattggatttgcctttgaggaagattccaaagaggaaggaccggagggcacaaggcttgaattcagggcccaggacggggctgtgcctccttcaccacgtcctctgctgcgcccgggcgcaaggaggaaggagagccgggagggcgtacctggcagccaaaagcccagccgctaatgagcccggtgcggcgcgagctatttttagcagctgctcctcgggacgcctaatcgctccggccggctcccgccaggctgccatggaaacgctcgcgccaccgccaggagctccctcccggtcccggccggcgctgcccgcccctcagcccggggccaggatgatgcgtgctgccccccgccaggaaggagccctgcctgccttcccagcactgtcactgcacggctgtgcgatcccgggacatctctgcccctctctgggccttagagggcaagagaggtaaaggcgcgcactggaggctgagaagcacgtttgaatctccgctgggccaacgacttggggtgcaaggtcaggagtgtcccagaatctgagccctctttttgtcatctgaaaagcaagcccccgcctcatttaactgcggagagcacccggccccgaggaataagtgatttcagaattccaaacactcattaaacacctactgcatgccagccattgccctaagctctttttttttttttttttttttttgagacggagtggagtcttactctgtcgcccacgctggagtgcagtgggacaatgtcagctcactgcaacctccacttcctgggttcaagcgattctcctgcctcaacctcccaagtacctgggattataggcatgagccaccatgcctggccttttttcttttttttcttttttttttttttaagagacagggtctcgctctggagtgcagtggtgcaattgtgactcactgcagcgtcagcctcacaggctcaggtgatcctcccacctcactctctggagtagctgggcccacaggcatgcaccaccacacccaactaatttttgtattttttgtagagacgaggtttcaccttgttacctaggctgatctcaaactcctgggctcaagtgatccacccgcctcagcctcccaaagtgctgggattatagaggtgagctaccacccccggcctaaatttttatttttatttttatttttgtagaggcagagtcttgctttgttgcccaggctgggtcttgaactcctggcctcaggcaatcctcctgcctcggcctcccagagtgctgggatcacaggtgtgggccacagcacccagcctgccctaagctttctatgcattcacttgattaattaaatccagaggcatgttacaggttatgcattcacagatgaagccattgctgccaggaggttaactggctctccggatatggaggcaaggaagggacccaggcttactggatggggacgcagagggtgagaggcttccctcctccagggtgcaggtagggacactgaggcagagacgagggtagcaagttgcccaatgctgagagccctggagttgggctctctctcgcccaccgaggaaagctattatagaggggtcgtgggcgggtggcgcggggcagcccgccaacaactgacaccaggggctatttcaggaagtgtcactcagtcagttgggacaggctgaggcccaaggagggaggacaggaagaacaaagccctgacctgggccaggacagggaggtggaggcaggaaggcagagtgcatgagactgcagccatgtgacctacggcatgtctgctttgccgctccgggcctcaatttccccatctatagagatgaggtcttgctatgttgcccaggctgttctcaaattcatgggctgaagcaatcctcctgcctcagcctctcaagtagctgggaccacacgcacacatcaccataccaagttaatttttaattttttgtgggcacagggtctcacagcatagcaagactctatctctacaaaagaaatgaaatgggagaaggggatttaaaaaattaagttacattttaaaactgaccaggagcaatggctcatgtctgtaatcccagcactttgcgaggctgaggcaagagaatcacttgaggccaggagttcgagaccagcctgggcaacataacaagcaaaagttatttatttatattttttattttttcattttttattttttgagatggagtctcacactcttgcccaggctggagtacagcagtatgacctcggctcactgcaacctctgcctcccagtttcaagcgattctcctgcctcagcctcccaaatagctgggattacaggcacaagccaccgcatccagctaatttttgtatttttgtagagacggggtttcaccatgttggccaggctggtctcaaactcttgacctcaagtgattcgcccacctcagcctcccaaagtgctgggattacaggcacgagccaccacgcccggccaaaatttttaattttttagatacaaaaagtttaaaaattaactgagcatggtcatcccagctactcaggaggctgaggtggaaggatcccttgaacccaggacttcgaagctacagtgaactatgattgtgccactgcactccagcctgggcaacagagcgagaccctgtctaaaaataaataaataaataaataaaatacagcaagccacgtgctaaaaacagtgccaagtgtcacgtgatgctacttttcagctattatgattcaccgatcgcatctgccacgggacatcaggcctcggtgggctcacagggaaggtggcggaagagctggcctcatcccaggtctgagggtcgaccctgaaccacgagagagagggagagagaaaaaggagtcccaaggctggcacacagctgtcctgagctggcttccccactcccgcttcccaccaccctgcctggccggtgcctgcattttcacccttagggctgcctccatggcacctgcaccagcccctgggaggagatgctggagctgcccagagctgggggcccgagtggaacacaagcccccatcctccactcttccccagtcaccctggcagcggggaggggaggggaagggaggggaggccaaggttacagagcccctccccctgcctggctataattagccccgagatgaattaaacatgaggctgggcttgtctgcagcagcggaggcagcagcttcgtccctgacactataattgttcccgggcagcaggcagaggacagggctgatgtgtgaggctgggggaggtggggacacactcactgggcacggctgtgggaacacagctgtgtggggcctgtggacgtctttggcaggtacacgcgtgtgcccgcatgcacatgtgtgtggtcctcaggactctccaggcacgagggggaaggggtggtccttgggcctggagaaggctcaaggctcaggaaccccgggatgaaggtagcagccccacaaggggcatggagggggcactctccagccccatctccagcagccctgcggtgggggtgggcggccaccattaaagctgccaacagccagcacggtggttcacgcctgtaatcccagtactttgggaggctgaggagggaggatcacttgaggccaggagttcaggaacagcctgggtaacatagcaagaccccatttctacaagaagtttaaacattaactgggtgtggtggcacgcacctgtaatcccagctacttaggaggctaaggcaggaggaacacttgaccctgaaaggtggaggctgcagtgagccaagatcatgccactgcctgggagacagagtgagaccctgtctaaaaaaaaaaaaaaactgccaccatcaggattcacaccttcgtgggaagccaccattccaacctcccgtcacgaagtcccagactccctcatccacagcgctatcgggcactcgggcaccgtagctgtggttccagcattccggccgccaccagccactgtcatgctgatgggaacccatcagtccagtctgcagtgaacatgcctgtctggttctgtctctcccaggctgggagccccctcagggctgggtctctggaccccgcatggcccagctcaggtgggattcccataatgggggaacacttctggggtctttggagtttggggaggtggagaggctgtggatgagggaagcatcctttaggtctagaaacatctgcaaattgatggacatccttgggcctcctggtcatcatcttcccactccaaaaactattatccatccattttataagggagggaaactgaggctgggagagagccagtgacctgcccaagtggcacaacgaggaaggcacaga[136 bp omitted]cggtgaaaacccgtctctactaaaaaatttttttaaaaattagccgggcgtggtggcaggtgcctgtagtcccagctactcaggaggctgaggcaggagaatggcgtgaacccaggaggcggagcttgcagtgagcggatatcgcaccactgcactccagcctgggggacagagtgagactccatcttaaaaaaaaaaaaaaaaaaaaaaaaaaacaccattatcaggctgggtgcggtggatcacgcctgtaatcccaacactttgggaggctgagaagggaggatcacttgaggccaggagttcaagaccagcctgggcaacatagtgggaccctgtctgtacaaaaaaattaaaaaattagctgagcatgggggtgcatgggtgtggtcccagctactcgggaggctgaggcaggaggatcacttgagcccacaaaggtagaggctgcagtgagctatgattgtaccactgcactccagcccgggccaaagactgagaccctgcctcaaaaaaagaaaaaagaaaaaaaagaccactattagtcactcacaccttcacgaatatggccaactccctaggagagaaccctggattggattccagctgggttcaaaacccaggctggaagcattatgaggtcttgggcttttggatggggtgagagagagaggagggtgacctcaggcctgctcctctcctctctgggcctcagtcttcccatccaggagatgggacaatggcgactggagacagtcttgttgggggcagggaagacggtgtcaggatctcattccgggacgcccgccacctggccctgtaccagtgaaattcatttcccggaccctggcccaagaaatggtgaaatctctccagcagcctgctgatagcaactttaagtctttctgcagagaggaagggaggtgagagatggggagaagagaggggagtgagaggcaggggcctcggtcagtctctcagctgtaaacactccctccctctactaggatcagtgagctatgattgtaccacagcactccagcctgggtgacacaatgagacccccatctctaaaaaaaaaaattaaaaattaaaaaaaaatttaaaaggccaggcatggtagctcatgcctgtaatcccaacactttaggaggctg[133 bp omitted]gagccaggagaattacctgaatctgggaggcagaggttgcagtgagccaagatcatgccactgcactccagcctgggcagcagagcaagactctgtctccaaaaaaaaaaaaaagccgggtgcagtggctcacgcctgtagtcccagcactttgggaggccgaggcaggctgatcacctaaggtcagcagtttgagaccagcctggccaacatggtgaaacctggtctctactaaaaatacaaaaattacctgggcgtggtggtgcgtgcctgtaatcccagctacttgggaggctgaggcaggagaatcgcttgagcctgggaggcagaggttgaagtgagccaagatcacaccactacactccagcctgggagacagagcaagaacctgtctcaaaaaaaaaaaaaaaagaaagaagaagaagaagaatgttttcctcattcacagcccctccacctccccagactcgaaagaccccaggagtatcccgccattataggatcccacccgagctgggatatgcagtgttcagagacccagccctagagaggctcccaggctgggggagacagaaccagacagaaacctcacagcccaaacaaccaggccctgtgcagggggatctggtggctgagtacacggggccccctacagacaaagagtgtttacacgtggtaaataaagacactcccggtgaggggaacagccgaggcaaacacatggaggcaaaaagcaaaaaaaaaaaaaaatcccaaacttcctttgggaagccaagacagacagatcacttgaggtcaggaattcaagaccagcctggccaatatggtgaaacaccgtctctactaaaaatacaaaaattagccaggcgtggtggcgggcgcctgtaatcccagctacttgggaggctgaggcaggggaattgcttgaacccgggaggtggaggttgcagcgagccaagatcatgccactgcactccagcctgggtggcacagcaagacttcgtctcaaaa[147 bp omitted]cggtgaaaccccgtgtctactaaaaaatacaaaaaattagccgggcattggtggcgggcgcctgtagtcccagctactcgggaggctgaagcaggagaatgacctgaacccaggaggcggagcttgcagtgagccgagatcgcgccactgcactccagcttgggtgacagagcaagattccgtctcaaaaaaaaaaaaaaaagaaagaaaagaaagaaacccactctggtgtctatggtgcattcaaaatgacaaatcccacagccagaaaggctcttgcaaagtaggggtgattgagaagagcttacaccccccgcccagagctattataaggataaaatgagataaggagagtgtgtaaacccccagcacatactcagtgcttgcagagcagcttttgcaaccatggcaccaatcaagcccgtgtagatcatttttttttaacagttatatattcatttcaatgtatatattcccccaaatttatatacagcatctactctactcaaaaaagatgtatatctgggttttcatggcaggatataaagggtgcattttagaaatagatatattttgtcggaaaacaatgagaggaggagtcggtttagagaaaaatgatggtgggaatgaaggaagcctggagtcaggaaccgctcagagtaatagatttctcagcctgttcctgggcccagtaattaatcctgaggggctaattaaattccagcttcctctctagccactcagcagcctccctcctggcctccctctcccccagggaggcccggcctggcccgcccctgccagagcctccctcctgctgaaccgccaggcccccagttccctgggcttaatcatcaggaattaaggtttaatcagaaggttgcctgagaggaacagcctcccaggtgtacagccgcaccaggaatagggtgagctcagtgaggcgggctcgagcaaacgcagggtcagagcctgtcattcacttcacacttagatattttgttcatcgtctatgttttcataatcatcgtgacttcttttttttttgagacaaggtcttactctgtcacccaggctgcagtggaatggcactatcatggctcactgcagcctcaacctccctacctcaagtgatcctcctgcctcagcctcctgagtagctgggaccacaggtgtgcactaccacacctggctaatttttgtatttttcgtagagacgggagtcttgctatgtttcctaggctgggtcttgaactcctgaaaccaagcgatccttccaccttggcctccccaaatgctgggattacaggcatgagccatcctgcccagtctcctcatgactttttttttttttttttgagacagagtcttgctctgttgcccaggctggagtggcgcgatctcgactcagcatctgcctcccaggttcaagcaattattctggcctcagcctcctgagtagctgggattacaggcgcccaccaccacgcccggctaatttttgtatttttagtacagaggaggtttaaccatgttgaccaggcttgcctggaactcctgacctcaagtgatcagtctgccttagcctcccaaagtgctggcattacaggcgtgagccaccatgcctggcccctcatgacgtttttcaatgttgcatcaaactactgtttatcttggtgactgagttgaacggcacctccttaaattttgcactgaggtgggtgccttgctctctttaccctaattctggtcccaactcctccacgcatgcacaaagccagcaactcctaagcatcttgagacctgaagctcatttcagcttcaccgctgtctgaggacaatctgttattgggcccattttatggatgagaaactgaggcccagaaggtcaagtcactggctttgggttccttggctaaggggaggcagaggcaggatttgaacccaagacgccactgagatggggttgctgcctgtcctgaatccagagacaatgcaacccgcttcagagcaccctttctgaagtgtttttgtttttgttttcttgtttgttagtttgttttgagaccaggctggagtgcaatggtgcaatctcggctcactgcaaagcaacctccacctcccgggttcaagcaattctcatgcttcagcctcccaagtagctgggactacaggcacacaccaccatgcccagctgatttttgttttttgtgtttttttgagacggagtctcattcttgtcacccaggctggagtgcagtggtatgatcttggctgactgcaacctccacctcccgggttcgagctattctcctgcctcagcctcccaagtagctgggactacacgcatgcaccaccacacctggctaatttttgtattttcagcagagatgaaatttca[142 bp omitted]tgtccctctagagaacctctagagaacaaatactttaatattaatctatcaggtatccttccccactttataccacccttatctagtctatgggggacactactaatctatcaagtaaccttccccacttcctgccacccccacctgtatgtggactacaatagaaagagagacttgaggctgaaggaagcccagcgtaggtatgaggacttgttctgggctttgacgcatccataggagttttctaggtatgagtagggtctgctgaaagggctttactgtgtatgcaaaagcctagagaagtgaaggagagtgtgactcattcatggactaataagtttgtctccttgaagctggagaggccttgaaggccagaaaaggagcctgaacgtcatcctgttcatcctgttcacagtgacacggtcacccaggctcaattccactccccatcttccagtttctcggcttcctccaacacccgacctagctcccaggtgttaaggtcagaagtgaatgcacctgtgaattagtgaaggaatgagtgagcagaggcagctgcttcaaggttgtgtggtgatacatccttctgaaccctgccccggtgcttcacggtacaggctccagagaggactcagcctgggaccctgcccccaaggatccccaggctgggactgtgggatggagctggacacagacacccaagctctgcagagtcagggctggtgctgagcgaccttggaggggaggacattggagctgcgtgcaaagcttttttttttttttttttttttttgagagagggtctggctctgtaacccaggctggagtgcagtggtgcaatctcagctcactgcaacctccacctcccggacccaagtgatcctctctcccaacccagaaggcggaggtttcagtgagccgagatcgcaccatcgcactccagcctgggcaacaaatatggatgtgggggaataggcaagcaggtaggtggatgtggctggctgcgtggaaagaacaggggtggtgggggcagccaaggatcaatcaggcactggtgagaagttctagcttcatcccgaaggcaatgggagccatggagggctctggacagaggagagacattgccagacccaggtgctcacaggaacccttctgggggctacagcggcaacagattgtgaagggaggtgattgcattggtctgggaaagtgacgatcatgtacctaaacccgcgttgtccaacgtgggagccactggccacatgtagctattgag[134 bp omitted]tctactaaaaatacaaaaattagccaggtgtggtggcacgtgcctgtaatcccagctacttgggaggctgaggcaggagaatcgcttgaacctgggagatggaggtttcagtgagctgagatcacaccattgcacttcagcctgggtgacaagagtgaaactctgtctcagaacacacacacacacacacacacacacaccccagaaaaaatagctcattcacaattttttctatagattgcatgcttaaatgataaaacacattactaaaactaatttcacctgtttctttttactattttttattttttgagacggagtttcgctcattgttgcccaagctggagtgcaatggtgtgatctcagctcaccgcaacctccacctcctgggtgcaagtgattctccggccttagcctcccaatcagctgggattacaggcgtgcaccaccacgcccagctaattttgtatttttagtagagaccaggctggtctcaaactcccgacctcaggaggtccgcccgcctcagcctcccaaagtgctgggattagaggcgtgagccactgcgcccagccttctttttactgtttttttcttgtggctaccaggaaatctttaattgcccacgttgatggcatttgcatttctaaaatgctgcagcctttgcaccgaccaccagagagtgctgtgcccatgtggcaggatcaagcaatccggaatctgaaggaaaagaaagtagttcaagctgacgatcagttagatcagttcttacaatggagacacgtttaccatctggcatctttcagcatctaagggagacagatctgcctggagatagggagtctgccgctgatcctcacaccattttatcctgct[132 bp omitted]ctgcaacctccacctcctggacccaagtgatcctcccaccccagcctcccaagtagctgggaccacaggtgtgcaacaccataccaggctaatttttgtagtttttatagagacagggtttcactatgttgcccgggctggtcttgaactcctgagctccagtgatgcctgccttggcctcccaaattactgggattaaaggcgtgagctacagcatttattagatacctactgtcaggcctctgagcccaggccaggccatcgcatcccctgtgactggcacgtatacatccagatggcctgaagtaactgaagatccacaaaagaagtaaaaacagccttaactgatgacattccaccattgtgatttgttcctgccccaccctaactgatcaatgtactttgtagtctcccccacccttaagaaggttctttgtaattctccccacccttgagaatgtactttgtgagatccacccctgcccaccagagagcaaccccctttgactgtaattttccattaccttcccaaatcctataaaacggccccacccgtatctcccttcgctgactctcttttcggactcagccggcctgcacccaggtgaaataaacagccatgcttctcacacaaagcctgtttggtggtctcttcacacagacgcgcatgaaatttggtgccgtgactcggatcgggggacctcccttgggaggtcaatcccctgtcctcctgctctttgctccgtgagaaagatccacctaccacctcaggtcctcagtccaaccagcccaggaaacatcccaccaatttcaaatccggtaagcggcctctttttactctcttctccaacctccctcactatccctcaacctctttctcctttcaatcttggcgccacatttcaatctctcccttctcttaatttcaattcctttcattttctggtagagacaaaagagacatgttttatccgtgaacccaaaactccggcgccggtcacggactgggaaggcagccttcccttggtgtttaatcattgcagggacgcctctctgattatacactcacgtttcaagggtgtcagaccacgcagggacgcccgccttggtccttcacccttagtggcaagtcccgctttcctggggcaggggcaagtacccctcaaccccttctccttcaccctcagtggcaagtcccgctttcctagggggcaagaaacccccaatcgcttatttccgcaccccaacctcttatatctctgcaccccaatcccttatttccacaccctgacctctttgtgccccaatcccttacttccgtgccccaaccccttctctgcttttctggagggcgagaaccccccaccccttctccgtgtctctactcttttttctgggcttgcctccttcactatgggtaagcttccaccttccattcctcctccttctcctttagcctgtgttctcaaaaacttaaaacctcttcaactcacacctgacctaaaacctaaatgccttattttcttctgcaatgccgcttgactccaatacaagctcgacagtagttccaaatagccggaaaacggcactttcaatttttccatcctacaagatctaaataattcttgtcgtaaaatgggcaaatggtctgaggtgcctgaagtccatcagtcccttcctactctctgtgcccagtgcaactcgtcccaaatcttccttctttccctcccacctgtcccctcagtcccaaccccaagcgtcgctgagtctttctcatcttccttttctacagacccatctgacctctcccctcctcgccagcccaagctaagtcccaattcttcctcagcctctgctcctgcatcctgtcatttttttatcgcctcccctcctcacacctggtccggcttacagtttcgttccgtgactagccctccccctcctgcccagcaatttactcttaaaaaggtggctggagccaaaggcatagtcgaggttaatgctcctttttctttatcccaaatcagaagcgtttaggctctttttcatcaaatataaaaacccagcccagttcatgacttgtttggcagtaaccctgagacactttacagccctagaccctaaaaagtcaaaaggccgtcttattctcaaaatatattttattacccaatctgctcccgacattaaataaaactccaaaaattaaattccggccctcaaaccccacaacaggacttaatgaacctcgccttcaaggtgtacaataatagaaaaaagttgcaattccttgcctccactgtgagacaaaccccagccacatctccagcacacaagaacttccaaatgcctgaaccgcagcggccaggcgttcctccagaacctcctcccccaggagcttgctacacgtgccggaaatctggccactgggccaaggaatgcccgctgcccgggattcctcctaagccgcgtcccatctgtgtgggaccccactgaaaatcggactgttcaactcacctggcagccactcccagagcccctggaactctggcccaaggctctctgactgactccttcccagatcttctcggcttagcggctgaagactgacgctgcccgatcgcctcggaagccccgtagaccatcacggacgccgagcttcgggtaactctcacagtggaaggtaagtccgtccccttcttaatcaatacggaggctacccactccacattatcttcttttcaagggcctgtttcccttgcctccataactgttgtgggtattgacggccaggcttcaaaacccctgaaaactcccccactctggtgccaacttagacaacactcttttatgcactcttttttagttatccccacctgcccagttcccttattaggccgagatactttaaccaaattatctgcttccctgactattcctggactacagccgcatctcattgccgcccttctccccagcccaaagcttccttcacgtcttcctctcgtatccccccaccttaagccacaagtatgggacatctctactccttccctggcaactgatcacatgcccattaccatcccattaaaacctaatcacccttaccccgctcaacgccaatatcccatcccacagcatgctttaaaaggattaaagcctgttatcactcgcctgctatagcatgggcttctaaaacctataaactctccttacaattcccccattttacctgtccgaaaaccggataagtcttacagattagttcaggatctgcgtcttatcaaccaaattgttttgccatccaccctgtggtgcccaacccgtaccctcttttgtcctcaatccgttcctccacaactcactattctgttctccatcttaaagatgcttttttcactgttcccctgcacccctcgtcccagcctctctttgctttcacttagactgaccctgacacccattaggctcagcaaattaccaaggctgtactgctgcaaagcttcacagacagcccccattacttcaatcaagcacaaatttcttcctcatctgttacctatctcggcataattctcaaaaacacacgtgctttccctgccaatcgtgtccgactgacctctcaaaccccagcacctacaaaacaacaactcctttccttcctaggcatggttagcgtggtcggaattcttacacaagagccaggaccacaccctgtagcctttctgtccaaacaacttgaccttactgttttaacctagccctcatgtctgcgtgcagcggctgctgctgctttaatacttttagaggccctcaaaatcacaaactttatcagtcctccaggcccaagttgactctttagctgcagttgtcctccaaaaccaccgaggccttgactgacttactgctgaaaaaggaggactctgcatattcttaaatgaggagtgttgtttttacctaaatcaatctggcctggtgtatgacaacataaaaaaactcaaggatagagcccaaaaacttgccaaccaagaaagtaattacgctgaacccccttgggcactctctaattggatgtcctgggccctcccaattcttagtcctttaatacccatttttctcctccttttcttcagaccttctatcttccgtttagcttctcagttcattgaaaaccgtatccaggccatcaccaatcattctatacgacaaatgtttcttctaacatccccacaatatcaccccttaccacaagacctcccttcagcttaatctctcccactctaggttcccacgccgcccctaatcccgctcgaagcagccctgagaaacatcgcccgttctctctccataccaccccccaaaaattttcgccgctgcaacacttcaacactattttgttttatttgtcttattaatataagaaggcaggaatgtcaggcctctgagcccaggccaggtcatcgcatcccctgtgacttgcacgtatacatccagatggcctgaagtaactgcagatccacaaaagaagtaaaaacagccttaactggtgatattccaccattgtgatttgttcctgccccaccctaactgatcaatgtactttgtagtctcccccacccttaagaaggttctttgtaattctccccactcttgagaatgtactttgtgagatccacccctgcccaccagagaacaaccccctttgactgtaattttccattaccttcccaaatcctataaaacggccccacccctatctcccttcgctgactctcttttcggactcagccggcctgcacccaggtgaaataaacagccatgctgctcacacaaagcctgtttggtggtctcttcacatggacacgcatgaaacctactgtgtactttgctttctttgctcttggtgattccccaaaaaacttatctcaacatataaggatttttcttttctttttttttttttgtttgagacggagtctcgctctgtcgcccaggctggagtacagcggcgcgatctcggctcactgcaagctccgcctcccgggttcacgccattctcctgcctcagcctccggagtagctgggactacaggcgcccgctgccacgcccggctaatttttttgtatttttagtagagatgggtttcacc[140 bp omitted]caaggctcagagaggtcagtggtgcaatctcggctcacagcaacttccgcctcccgggttcaagggattctagtgcctcagcctcccaagtacctgggatcacaggcatccgccatcacacccagctaatttttgtatttttagtagagacagggtttcgccatgttgtccaggctggtctcgagctcatgacctcaggtgatccgcccaccttggcatcccaaactgctggggtaggattttcttttttacttccctttttccaaatgagaaaaccaaggctcagagaggaagagcgtgttgccccaagtggcccagcagagccacagccttgcccccagcagctctggctctaatgcattccagactcctcccatcagccaactgcctcccatcctctaataaacttctgagaagcgctgggcagatgcagtggcgcccacgctctttatctgcccagatcaggccggctcagcagagcagtcgataattaattctgaattctccccatttatcacggcggcaggagccagagtgcctggaatcccaatcccaaacctccgtgccccttggtcacctggaccaaggcccagtggtggcaggaactatggtggagagggggcctcattgagcctgggaagggagcaaaggtgttcctggctccccaccgctccctggcgctgggttattaaacgctgtgtactgcagcagtgaccaaaccagacctcttccccgtcttcatggtgcccacaggctagtggggaaaacatacattgaatgaataataatataaataattaatgctacaaaggaaaagaacaagatgttgtgagaatacaaaacaacaggaacataacttgttttgggggcctccccaaggaagtgacattgaacctgcaaatcacagggtgaaaggtgaaaggttgggagagggtatttcatatacagaaatagcccatgcaggctgggtgcggtggctcacagcactttgggaggcca[134 bp omitted]gagacaggattctcacctcctggttcgcttgaacccaggaggtggaggttgcagtgagctaagatagcgccattgcactccagcctgggcaacagagctagactctgtctcaaaaaaagaaaaaaaagaaagaaaagaaaagaaatagcctgtgaaaaaaaccttgtggctggagcccagcaaggggtttagtaggtctgaagcttaaagcacaagtgtgaggtcagtgccaagtcaggggacctcagggccaggcctggagccctcatagtgaggccagcagccttcagtggatagccaggggccaccaaggaaagagatggataagtttccgtgatgctccaaggggtggtagtgaggctgcttctgccccaggtgcatcaccctgcaaggtcagtggtcggctctgtgttgttttttttttttttttttggtttgtttgtttttgagacggagtctcgctctgttgccaggctggagtgcggtggcgtgatcttggctcactgcaacctccgcctctcgggttcaagcaattctgcctcagcctcccaagtagctaggactacaggcgcctgccaccacgcctggctaatttttatatttttagtagagacagggtttaaccatgtcggccagaatagtctcgatctcttgacttcgtgatctgcccgcctcagcctcccaaagtgctgggattacaggagtgagccactgcgcctggccgggtttttttttctttcttatgactgttttcctttttgagggttctttcaaatccatttgggcacgggggttagtcaggatttgtctgccagcaaacaccgaatgcctggctatcccaaacacttcccttcttgggcaggcagggaaactgaggcccagcgagggacaaagaacacccaaggtcattcagaggaaggttgtgtgtgggagaggtttctggggagtctcaggggccatgcgcttgccctgcagcttctgtggcttttgttgggccgtgaactccgtggggagcttgactgggtatcctagtcaccacgctgtcctcagagccctgcaaactggaggtgcttaatcagtgattgtggaatgcatgatcccagcagcttctgaagacaccccagaggtcatgcttacgatattggaaggaaagggggtctttttttctttttctttttttttgagatggagtcttgctctgttactcaggctggagtgcagtggcacaatctcggctcactgcaagctccgcctcccgggttcacgccattctcctgccttagcctcccaagtagctgggactacaggtgtgcaccaccaccacgcctggctatttttttgtatttttagtagagacagggttttgccatgttgcccatgtccaggctggtctcgaactcctagcctccagcaatcctctagccttgacctcctaaagtgctaggattacaggcatgagccactgtgcccagccaactaatgttttcattatttattttttaaattttaatgttatatttcttaattttttattttatttttatttatttatttatttatttttgagatggagtcttgctctgtcgcccaggctggagtgtagtggcgcaatctcggcccactgcaagctccacctcccgggttcacgccattctcctgcctcagcctctcgagtagctgggactacaggcacccgccaccacacccagctaatttttcactgtgttagccaggatggtctcaatctcctgacctcgtgatccgcccgcctcagcctcccaaagtgagccaccgcgcccagcctattttttctttttttttttttttctagagacagggtctcgttctgtcacccagtctggagtgcagtggtatggttatagctcaccgtggtctcaaactcctgggctcaagtgatcctcctgcctcagcctcccaagtagctgggaccacaggggcatgccaccacacctggataatttttaaatgcttttgtaaaggctgggtctcgccatgtttcccaggctggtttcgaactcctaggttcaagcaatcctcctgcctcggtctcccaaagtgttgggattatagtcatgagccactgagcctggcctagggaaagaggggtctttttcaataggagatttgagaaaaaaatacagagacatggagagagacagagactgagatgcagacgaactgagaaacgcagagagagagatattgaagagagggagagataacgagatacaaacagaaccacagacagaaatggagcgacagagagcagatgaaaaagaggccgggcgcagtggctgatgcctgcaatcccagcacttcgggtggccgagacgggtagatggcttgagcccaggagtttgagaacagcctgggcaacatggcgaaaccccatctctacaaaaatttaaaaattagctgggtgtggtggcgtgtgcctaaaatcccagctactcaagagcctgaggcgggaggatcgcttgagctggggaggttgaggctgcagtgatctgtgattgtgccaccgcactccagcctggacaacagaacaagaccctgtctcaacaaaaataaaataagagactgagacacagagacagatgaagggagaggagagagagagaaagaaagatggcaaggtcagaaccagcactaacttgtatgggagctgttggatgaattacaaagaagggccccttcctggggccctctcacctctgcagctgggtcctcttgtgcagtgaacaacctgccccactgtctgtggcagccggagcagcatctgtctttatatctctcattgaatgaatgctcagagttaggagaatgccagagcccagcctggagtcgcacagaaagagaacagagagatagaggcagggcaggaaggaagtggcaattccaggtcctggcagtttctggctaaaccgctgacatctcctctgggaaccgcctgggctcacttgccccctaggagaattcccttggaccttcttggagcacaaactaggtgggcggccaagacgggaggtggcccctccccagaacgccgcgggccttagcgagacggcagctgccaagtctcacccgaaactcctcatagcccagacttgctcagggtggagcccagagtctgagaggccctggcggggagcgagcaggattccctgagtttcacagcccagatatgggagggggctggcctggggtcaactggagtaacagtgtcacctggagtaacagcgtcacctggagtaacagcatgtgcaaaggcctggaggggagtgagaggaaggtagaagtagagctcagcccaaaaccatagatggggtagaatgaagcccaagagagctccaaggccaagttaggaagcttaaactcaatcttgttttcaaacatgtaatcttttattcagtacactctcaaaacagcatttctgtatctagttccaagctgggtgatcctgcggccccaaaggtagtgatgactctgctgggaggagacacagacctcccagttcagtggatcccgagtgagtcagaaggtgagactggaagcagcagggtccttgagggaagtaggctctccttgaaggataagcaatggctgcatgaagtagcaggtattgaagctagggctttgaaggatgaataggagcttgccaaacaaagaaggtgggacatgcaaaccaagtggagggactgtggcccaaactcagggatacatggatggagtagcaggagaaaaacagactgggggagcaggaagagtcagtgtgagctttctccagatccaaaatcagcagcctgtcattcaaggccaagacattccacaatagttccccttggccctgtcaagcctatcaggcctggagcttcctcaaagcagctctgacaactccagccactgtcatctcccctctttgtgtcacgaggaccatgcactttggtgcatggtgacattcagtgggggctgctttcctcggtgtggctgtgggaccttaggcccatgcctcagtttcccaacctggaaaatgggctgcaggaagccacttttgcaacttatgtttatctcaggccagggaggtcttggacaaatgatgtgaaggaagaagagaaaaatggaagatagggagggagaggaaaggaagggggcgaaggaagggagaacagatgggaagggaagggaagggaagggaagacggaggaaggaaaaggccgtgcacctcccgacccaggtcatcatcaagggacaggtccaacattattatttcagaacatgccagcgctgtcgaggcttaagaaatgggtggtgatttgcatgcgatttgcatgtgatttgcatactgtttgttaaatgtcaaaacaccctgaaaatgctttctcccacctccacccccagtggagaagcgggaaacccttccccacttcctccaccagctcccggcatgggttggggacgcctcagttcagagggtggtgaccttgggcaagccaaaagccatctgtaaaatgggctgttatcctg[138 bp omitted]gcctcagcctaccaagtagctgggactacaggcgcccgccaccaggcccggctattttttttgtacttttagtagagacggggtttcaccgt[138 bp omitted]aagtcctggcatggagtaaggaccaaggaatgaaactggggagattattaaatgccccattttcttgccaaaccctgacgaggcatgtccctgaatatgcacagggaaatgaggacagaggggacccaggctctagatacacgcatgtggcccagctgttagcagaggcccaaaccacgcatgagcagggatctgggctgcctccccctgctgtgtgtccctgacaacctccttgggcctcaggctaccctctgcagaacagacagcagcagactctgctctaggaggagctccagggggcacacagtgggtctctggggacaaagtcctgggttaggcaccaaggggagaggtggagggggataggaagacccccctccaggcacacccaggggccagcaagacccaagtcattctgcaaagcagctccagcaggtctgcctgccggagtgaagtggggctcctctctcttcccctccttctccccctcctctcagccaagcgggaattgcagggtagatgcccgaagtttggcagatgctctgaagggaggcgagcaggagaccccgggccaagtgctgtccccgagctaagcaaacgcacagtctgggcacggctgtccccgtggtggtgatttactatccacctgtccatgctctgagtcctgcagccaacaggactcttaactaaaacattatttcttcccagcctctggcgcctccgcccatggtgcctggagagtgtacacggccctcgaggacatgcgtagcctcggcaccccctccccaaagaccctccccaggggctgcgcaacgatgacgtggctgcaggtcagaggtgcaacggaggcccggcacactgccctgagggtctccacccggaattcccacaacgcactccctgcaatgccccgcgatgacctcccacagctaggcccagttccccacccccagatcctcgtcctcttggccagagttcttcagaaccccttccccgctgccccaagaccctatgcaagacgaggcatccggatttaaggggaagggggaaacagcccagggggtgggcacaggtgcctcctggggaggtatttgggggtggaaatggggcacagttggaggcctgagaaggagctaggatgtccgcatctccccgcttagtcattggagagttcggacacgactggctgcacccccagccagggctgttcactgcacaaagggcctgtgggggccccaaagaaggctaggtgctctctggctgggaaggagggaatctgagaagacttcctggaggagactgcaatcccaggtgtattggagctgcagagaagaggttgaaaagtgctccaggcagggggcacggcttgggcaaaggtgtggctgggaaaatgtcctgggcaagagcggaagtgcctctgagtgtctctcctgccccttctgtgcttctcttcttgcgatgccctctggctgcccatgggagctttccaaggtggcacagtgctttccactgaagacagggcacccagggccccaagaggggagcaacaacctcaaagtcacacagcagagctgaaaggctcaaggctccctcccgataggctgggcaggagcaaaaatgtcctaggtccttgtcagggactggggctccagcaggagtgtctgaagcagtgtgcatcagctggtcaggccagggtttcatggtccacctgggagcccagaccctggaacaacaggaggggaagggtaaacccgtttcaatccaggaccagggaagggtgaaacaccagttctccagccatttgtcctttccttttacctaacatccctgacacggacagtgatctgcagtcatcccctcctgtggatgtcccttgtgtcctttaagaggaacagggatggcccctggtgaatttggctgttttcttttttctttcttttttttgagacagagtcctgctctgtcgccaggctggagtgcaatggcgtgatttcggctcactgtaacctctgactcctgggttcaagcgattctcttggaacttggctgttttctgccacctgatggcagtcacaggaattgcaggcaaagagtgcagtaaagccaaatcaaagctcaatcctttattgtaaggagacaggtaacagagcccagagaggagaagcaattttcccaaggtcacccagcaagtcaggggcaacacggctctggtccacgtgttagtccaaaaagaaatgagacaccaaggccatgtccctaccctagaggccagaagcataagtgtatggagggggatgatggtcaataacatctgtctcttctcctctctgggcctcagtttccccatctatggtctccacaatctctaaggtcctttctctttctcaactactacaattacttacctggagtgagatctaggctcccgggaggcaggagaagtgccttccaaaagtgccctctaccccagcctattccttcagccagtacccaggtccccttggtcatggctctgcctcctccaacccagactacctgaaagagggagacagaaagacacaggttgcagaaaaaacatagcccttgccttggcgttcaaggcttccctattctgcccactgtctggctggtgcctcttcctgcccctgccagggctcacctctgacccagaaattccctcccctgcatccaggcaccgctagagctccagaaaaatattctgagcagcccaatccttgcctctgctcacgattatgttagtgagacaatacatctcactaacatttattaagcacctactatgtgccaggcactgaactggcaatccagcagggaacaagatggacggcagtaccctcacagagtttacagtctactgcaggagacaggtgaaaaaaataagtaaaacgtagagaagtcggctgctgacaagtgatggggaaagagagaaagcagggatggcgtgaaataaaattttattatttatttctttagagacggagtttcaccctgtcacccagactagagtgtaatggcacgatctcagctcactgcaacctccgcctcccagactcaagcgattctcttgcctcagcctccccagtagctgggattacaggcatgcgccatcatgcccggctaatttttgtagttttagtagagatggggtttcaccatgttggccaggctggtcttgaactcctggactcaagtgatctgcttgcctcagcctcccaaagtgctgggattgcgggtgtgagccgctgcgcctcgctggaatgcaattttaaacaggatggtcagggagggctgcaggaagagagggagttggggacctgagggaacagcattccaggctgaaggaacagcctgtccagaggctctgaggcagcgaggaggcctgtgtggctggagcagagtgaggaaggggaagagagggaggaggagcaagcagggagggaatacagcaggtcatccagggtcttgcaagcctcaggaaggacttgggctttgaccctgagggaggtgggagccatggagggctgccggcagaggagggacacgccccgactcaggggctcacaggcgccctctggcacctgctacggggaggacagacttgtaggggacaagggcaggggctgcggaccttggtggggggcaactgggctgggccaggggttgagaagtgggaggattatggttagactttgaaggcggagctgatggaaccagctgaaggacagatagaggggcttgggaggaagagaggaatagactgatgtcaataaaatcagaataataacaactgttcccactaatggagcagggagaaggtttagtgatgaagggcgtggctttaaagctgggtttagaccctggctctgccccttcccagcttaatcttactctgcctcagcttctccacctgtaaaccgccaatgataacggcacccggccaggcacggtggctcacgcgtgtaatcccagcactttgggaggctgaggtaggcagatcacctgaggttaggagtttgagaccagcctggccaacatggtgaaacggtctctactaaaaatacaaaaaaattagccaggcatggtggcgggcgcctgtaatcccagctactcaggagactgagg[132 bp omitted]gccaggggacagcggtaaggccacgtgaaaagcccctagcatctcaaaggctctcaaagcatgaccatgactcagtgcctgctagctcccgtgacaacctgtctccctgcaacgctgctgcctcgaggcagaaaatgttgtcactactgcatttcacagagtgtagaaacaggaggtggcaagagaggctgggggagggagaagagggggccctatctacccggaagtgagagagggcctggcaggtttgtcccgagcagcccacgcagcttctctctccctagggtaccgtctgcgctgacaggtcccaagtgtttttctcatttctcacatggggaagctgaggcctccccggctgctgctgcaccatccactagtagcccctgctctgcctctagaggtctgggagtggtctggggagctcagaacccatttgatgcccagagagggtgggttagctgcctcgggacacacagccagtgaacagcaaaggcagataggggcccctgtctgttggggaagacaaagctggactctgccatcaaccccagctgtgtgtgtggtcagggatgggcaaggggcagggcattaggacagggtgggagcccagaggaggttgaaactctctcttttttcttttgttttgagacggagtctcactctgttgtccaggctggagtgcagaggcacgatctcagctcactgcaacctccgcctccaggttcaagcgattctcctgcctcagcctcccaagtagctgggattacaggcgtatatcactatgcctggctaatgtttgtatttttagtagagacagcgtttcgccatgttggccaggctggtctcgaactcttgacttcaggtgatccgcccaccttggccccccaaagtgctgggattgcaggtgtgaaccattgcgcccagccaaaactgtctcctctgaaggcttctgttctctgcctccagcatggctcactgggacctcaccctggtctcctgtctccagccctccccccatcacagtctgttctccccgctgcagccaggggttgcctgtgagcattgagtcaggtcccgtccctcctctgcccacagccctctatggctcccacctccctcggagtcaaggcccaagtcctccctgcagtccgcaaggccctgcatgaactgccctggcccctccctgccctcccttcctccctctctcccccttgctccagccacacgggcctcctcgctgttcctccaacatgccaggtgcagtcctgcctcagggcctttgcacaggctgttcctactgcctggaacacccttccctgactctctgtttaaccacctcctccacatcatagcctgacatgtcacctttccggagaggcgtcccccagtcactgatccctctccaccttccctgcatcccccacagcgccaattgcgagttgacattctcctgtgctattatttggctctaggctctgtgaaggcgaaatctggtctctctgggtcactgctgaatttcagtgtccagcatggagtctggcacacagtaggcacacaataaatgctgactctgtactgcataattacagtctggacgtctgagggtcgtccagcccccagacctcatagaaggtacgctgccgagaacaccctctcctagccccaagctctgaacctccatccctcatcatcctctcagcctccccgtccccgctaagatcttccctcaagagggcctggggagggggcctctcctgcccccattgcagccccagactcctgcaacggggtggcatctgaggctcctgccctcaaaacatcaacccaggctcggtgactcaagcctctagagggctggtgaatgtgacccccataaaatccagggtaattcacatggcccccgtccctctcctgttcaatgcttccaaggaggtggtcccaggctctgagacgaggccccaccatcttcaccacctctcggccatcctcgacccatttcccagagctgccccaggccggcagtgagctgttcccgtggccccagcgcccttctctgcagacccctccttgggccagaagacgccccacttgagggtcgtcttggccaggggacctctttggggacccagatatccaagtgtgagtgtgggtaacggacactggagtggggctgtgggaaagataaggcggtagggagagaccagagaaggaagagagagacagagcttcagagacagagaaaaacagcagagaaaaatgcagagacaccagagagataaagagacacagacacacatgttgagacacagcgagaaaaagagcagagaccaaaataacagagacagagacacagagagagaaatacacagcgggaagagacagaaatggacagagacacgcagagaaacagagagacaaaagagacacacagagagaaaaagagcagagacagaaatggagagagacagagaaagagagacagaaatggagagacacacagaggaaagaaagcagagaccaaaatgggcagagacacagagagagacagagacaaaagagacagagactcacagagacacagagagagatgcgcgcacacacagacagaactggacagggacacagagacagagacacagagagacagagagaaaaacagcagagacagagacaaatggacaaagagacagagagacagggagagagagacacacacatacacagacacagagaaaaacagagacaaaaatggacaaagagacaaaagagacagacacagagagacacaaggagaaaaacagcagagacagaaatgggcagagacacaaagagacaaaggggaagagagacagagacacacacacagaggaaaaaagcagagaccaaaatggggagacagagaccagagagggagacagaaaagagagagggagacagagatgagggagaaacagggaggaaaacagcagagagagaagtgggcagagacacagagtgacagagaaaagagagacagagacagagacaatcacaggcaaccaaatcatcagggaaagaaataaacagaggcagagatggagagagacacacagagaggaaaaaacagagaccaaaatggagagagagacagagacaaagacaaaagagagagaggtgaggagacaaagatgagagacgcagagataaaagagacagagacaagagacagaaacaagagggagacagagataagagatggagatgagacagccacaaaagagatgagagagacaaagatgaaagagacagagataaaagagagacacagacaaaagagagagatgaaagagacaaagagaggcacagagataagagtcagagacaagagacagaaagaagagggagagagatgagagacagagacaaaagaagaagagacagagatgagagacagagacgagagagtgacaaagatgagagtgacagagacaaaagagagagaggcagaaaaacagcagagacagaaacaggcagagaaacaggcacagacagagagcccgaaagcaagacctgacaccggcaaggccgggtcaggagagaggccgggcgggcagcgcgaggtgggaaagcagtgccggcccgggaggccgccttgggcgcccgcctcccccgccgctctccaggggtccccggccgccgcccccgccccaccccaccccgagccccgcggccacctggggtcgctgacgagcagcagcaccgagccgtcctgcaggcgcgcgtcgcgcaccgtctggtggtcgtccagccgccgcgcgttgtagtagaaggcgcgcttccaggagctcacgccctggcccaccagctgggcgcgcaggtcgctgagcgtgtcccgcggccgcacggtcagcggtagcagcagcgcctcgtccgccaggtgcaccttgatgtggtagcgcttccagcgcgacagcccccgccgcagcccctccatggcgcccgcccggctccggctccagctctggccccgggccccgagcgccccgcgcacccgcccgactagcctggccgcccgcccccgccgcgcccgcgctccgcccgcccggacacgcccggcacgcagtgggcaggcccggcccggcggggcggggcgggtgccacggtcccctcaggcgtccgctccccactgctggccccagagtgcgcccgggggtctagaggcggagtggccactcagcacagagccatcagcgaggtcatcccagccaaggagacgcgcgaatgtccagggggttacatggtggaggctccagggagggaggctgggaggccactttatttgatctttttaaggacaggctggagcgcagtggcgcaatcatggttcgttgcagccttgacctcccgggctcaagcgatcctcccgcctcagcctctcaagtagctgggactacaggcgctgccaccaagcccagctcacttttgtagtttttgtagagatggggcctggccgtgttgcccaggctggttttgaactcctgacgtcaagtgattctccgccttggcctcccaaagcggtgggattataaccctcagccaccacgctcagcctacattaaaaaaaaaatttacttttaggccaggtgcggtggctcatgcctggaatcccagcactttgggagactgaggtgggcggatcacatgaggtcaggagttcgagaccaacctggccaacatggtgaaaccccgtctctactataagtacaaaaattagccaggcgtggtggcacatgcctgtagttccagctactcaggaggctgaggcagaagaatcgcttgaacccgcagacagaggttgcagtgagccgagattgtgccactgcactccagcctgagccacagagcgagacttatcgcaaaaaaaaaaaaaaaaaaaaaaaaaaaaaaaatggccgggtgtggtggctcacgcctgtaatcccagtactttgggaggcccaggtgggcagatcacaaggtcaggagatcgagaccatcctggctaacgcggtgaaacccccccgtctctaccaaaaatacaaaaaattagccgggcgtggtggcgggcgcctgtagtcccagctactccggaggctgaggcaagagaatggcgtgaacctgggaggcggagcttgcagtgagccgagatcgtgcgccactgcattccagcctgggagacacagcgagactccgtctcaaaaaaaaaaaaaaaaaagaaagaaagaaagaaagaaagagggagagagagagaaagagaagaggaaagaaagaatgaaagaaagaaagagagagagagaggaagagaaggaaaaaaagagaagggctgggtgcaggggctaacgcctgtaatcccaacactttgggaggccgaggtgggcagatcacctgaggttgggagatcgagatctacctgaccaacacagagaaaccccgtctctacaaaaaatacaaaaaaattagccaggcgtggtggtgggtgcctgtaatcccaactactcaggaggctgagccaggagaatcgcttgaacccaggaggtggaggttgtggtgagcggagatctgccattgcactctagcctgggcaacaagagggaaactccgtctcaaaaaagaaaagaaaagaaaagagcacctgctaagtgacagacagtcttctaggtactttattggggtgggggaagcatctcttacttttctcatgacactatgacttcccattttacaagtgagaaaactgaggcatagagaagaaaagagatttcccagaggaaacagagagaaaagtggcagagctgggattcgaacccaggc[132 bp omitted]gcaacctccgcctcccaggtgcaagcaattctcctgcctca[131 bp omitted]gccttggcatcccaaagtgctgggattacaggtgggagccacctcgcccagcccacaaacatcactcttacacaaccatgagagttcagatggaggtttctagtttttattattattattactatttttgagatggagtctcactctgtcactcaggctggagtgcagtggcaatatctcggctcactgcagcctccgcctcctgggttcaagcgattctcccgcctcagcctcctgagtagctggaattacaggcgtgcgccaccacgccaggctaatttttgtatttttagtagagacagggtttcaccatgttagccagggtggtctcaaactcctgacctcaagtgatctgcctgccttggcctcccaaattgctgggattacaggcgtgagccaccacgtccagccttttttttttttttttcagatggagattttaaagataactcaaaccaaattaaattccagatggccccttcaacccttgcccccagcgaaataaactatacaaatattaggagaaaacacaggagttaaaaataaaaataatctgggccaggcgcggtggctcatgcctgtaatcccagcactttgggaggc[134 bp omitted]gaggcgggagaatcacttgaacccgggaggtggagctggcagtgagccgagaccacaccattgcactccagcctgtgtgacagagtgatactccgtctcaaaaaaatataaaaataaaattaatcttaactgtgttaaagcatattaaacccagaaacctttaattaaaagattaataactgactacaaatataaaattcctacacacatatgcacattaaaaaaatactagaagatcaaaaggcaacatcaaggaagaaagttttccaaaacacgacagacaaaagactgattttcttaatatgtaaagagcatctggaaatcaataaggattaacaagcaaattgaaaaaggggtgagagactgggcacagtggctcactcctgtaatctcagcactttgggaggccaaggtgggtggatcacctggggtcaggagatcgagaccagcctggccaacatggtgaaaccctgtctctactaaaaatacaaaaattagccaggtgtggtggtgggtgcctataattccagctacttgggaggctgaggcaggagaatggcttcaacccaggaggttgaagtacaatgcccagggtggagtacaatggcaactgtggagtacacagttgcagtgagccaagattgcaccactgcactccagcc[138 bp omitted]catggagaaaccctgtctctactaaaaattcaaaattagctgggtgtggtggtgcatgcctgtaatgccagctacttgggaggctgaggcaggagaatcatttgaacccaggaggcagtggttgcggtgagccaacatcgcaccattgcactccagcctgggcaacaagagggaaactccatctcaaaaaaaaaaagaaaaaagaaaaacaaaacaaacaaataaaaaatactagaagatgaagaggcaacatcaagggggaaaatcttccaaaacatgatagacaagagactgatatccttaatatgtaaaaagcatctagaaatcaatatggattaacaagccagtccaaaaaagggtgaaagacatgaatggatttttgttgttgttgttttgtttttgtttttgagcaaacagggtcttgctgtttcccacactggaatgcagtgacacaatcttggctcactgaaactgtgtaccacccctcccggctaattttcagtatttttagtagagacagggtttcgccatgttgcccaggctggtctcgaactcctgggattcaagcaatcctcccacctcagcctcccaaagtgctgggattacaagcataagccaccacacatgaacggttttctgaaaaggaaatacaaacgtcttctgggcataggcaagggagttcattctcgctcatggtaacctaaatataaaaaaaaactaccatgaaatatctttttcttcttttcatctgtctggctggtaaagatgaaaaagtctgagcatttgctgtgttttcagggttttgggaaaagagcagcctcatgctgctggggttcagagtgtgaaatggtgtaagctctctgacaatagctatttgaaaaaggtataagccagcagtgtcctttctgggaaggtatccgtgtgcacaaagagagatgataacataatacatgtgccaagaaatttacatgtaacacagcaaagtaggaggctggcatgatccctgacctccttgaacaaaggagggaaactgaggcccggagaggagtagtggcagaatgagaacccaggctgggctggtcactctccggggaaggtgggcgggctggcttaacctgaagaactaggtcaccatggccccagccacttccctattcaggctgaattccaggcctcgcccatcataattgctggtgtccaagaaggtcaaagggaggcctggggacactcggctttaacacggggaggccacgctgagccctgggagtgctaggtgccacttccagttaattctgactttctcattaagctgttaggaaaagctcggtggctgtgggcgaccggcccctgtgcctgggtctgtggattagagggatcatggtttttgcctcgagacactgtattatctgttgcgggcaattatggaagacccaggcagacagtgatgagctcagagaatccctgagctctggagtctggaggctcagaatcgtgggatcactgaacatgtagacacttaggatcttagaacagctggtgttcagtcctcctgaacaatgtggaatctcagagctctctagtgggtgggtgggggctctgagcggtaatcaccatacatcccctctggctgtcttaggggagaaaaagctgcagtagtaagttttaataaagttcagcaggaagca[133 bp omitted]aaggccctgactctacaatttttttttttttttttgagacggagtctcactctttcacgtaggctggagtgtcttttcacctaggcacgaactcagctcactgcaacctccacctcccaggttcaagcgattctcctgcctcctgagtagctgaggttagaggcatgcgccaccacgccaggctaatttttatatttttagtagacacggggtttcaccatgttagccaggctggtctcgaactcctgatcttaagtgatccgcctgcctcagtctcccaaagtgctgggattacaggtatgagccaccatgcccggccagaattttaaaattagctgggcgtggtggtgtgcgcccccgtagtcccagctactcaggagactgaggcaagtggatcacctgagaccaggagttggaggctgcagtgagctatgattgcaccactgcactccagcctgggcaacagagcaagaccctctctcgaaaaaaaaaaaaaaaaagaaagaaagaaatctcttctacattacaagaggcaaagtatctataattccagaatgtggcaatgctaagggcagtggatatgttacagatgggggcaagtgggcctggcacccaccctccttccctatttgcctacaggattggtggaatatgcagccccccccaacccacacttctccctgctgcccagcctctgatgaacaggcattctggcctatattattattattatttatttttatttatttatttatttttttgagacagagtcttgctctgttgcccaggctggagtacagtggcacgatcttggctcactgcaagctccgcctcccgggttcacgccattgtcctgcctc[202 bp omitted]ttttatcttattttactttatgaaacaggatcttactctgttgcccaggctggagtacagtggcatgaccatggctcactgcagcctcaacctcccaggctcaagcgatcctcccacctcagcctcctgagtagctgggactacaggcacacacctgtaatcccggttgtggtggcgggtgcctgtaatcccagctactctggaggctaaggcaggagaatcacttgaacctaggaggcgcaggttgcagtgagccaagattgtaccactgcactccagcctgggcgacaagagcaaaactccatctaaaggaaggaaggaagagaggggggaggaagggaggagaggaaggaaagaaggagggagggagaaaagaaaggaaggagggagggagggagggaaggaaggaaggaaggaaggaaggaaggaaggaaggaaggaaggaagggattgattgattcacacgcaggatgtttgttgggcaaatgaaggtttatggtggtccctattggcaagttgtgtttttctagcctcattctattagaaacaaaggctatctgccaccaacatgtttaaacaaagtagcattcctcatatataaagagttgttagaaatcaataaaaataaagcaacatgtgcaaagaacgtgcatacactttggacacacaaaagacataggtgggaaattgtaaaagacttgaaaaaagaatttcactgctgggcacggtggctcatgcctgtaatcccagcactttgggaggctgagacgggtggatcacctgaggtcgggagttcgagaccaacctgaccaatatggagaaaccctgtctctactaaaaatacaaaattagccgggcatggtggcgcatgcctgtaatcccacctactcgggaggctgaggcaagagaagtgcttgaacctgggaggtggaggttgcggtgagccgagattgtgccattgcactccagcctgggcaacaagagtgaactccgtctcaaaaaaaaaaaaagaatttcaccactctaatatttgacaaaaagatccaataatagtttttgtgaaggtacaaggcagtgagcacttgcatacattgctgggataagttagtaccaagtcccatctttctggagggcgaaatggcaaagtatattgaaagtctttgatggaaaataaccataatgactcacatttgttgagtgacaacctcatttattatcttttccccatcagaacagaaactccccaacggctattttgtctgttctattcaccgctgagttcccaatgtctgaaacaactcatgcccctgatttttatacccagcatgatcccgtctactcagttttctgaagtttgagaaccgctgagctgagctaaaaggaaagtttttatgcagacagacgtccaagcatccaatctatttaggcctttttgacaaccctcaagttcttagcagtgagtgaagaattctcaggggctccccactgacccataggttaatagatgtgcttgtagttattagaattaaatgaggtgatttttccttttttttttttttctttgagggaaggtctggctctgtgtcacccaggctggagcagagcggcgtgatctcagctcactgcaacctccgcctcctgggctcaagtgatcctcccacctcagcctcccgagtagctgggactataggtgcacaccatcccgcgtggctaattattgtattattattattattgttgttattgttattattattataattattattttgtagagacagggttttgccatgttgcccagactggtctcgaactcctgggctcaaaactaatctgcccaccttggcctctcaaagtgctgggattccaggcgtgagccatcacacccagcctgagataatttatcacattgagtctttagcatgctccaggagtgttcaaggttttataaacctcaactcacctcatagcaatgctatgagatagatgctaatatcaagcccattttttttaacacaaacaatcccatagtatttattgccatcttgtagtaacacaacggtaatcaaaacaatatgaataaatcttcacattggacaaaggacatctaaaaacaaactgtatccttctcaacaatttctcacttcattgatcatttctagttggagacactttgcagcagagtaatattacctccttttagcatgatccgacccagttgttttcttgactttgttttagaatgaatctcttctgcatcatctaatacaaggttcatatactcatcaaaaccaatgatacagccttctatccgcatattcacttgctcatagagccacacctgaatccgcgatctattttgtaagtatctgaagatgaggctgatgggctgcaccataaccttctgcactttctggccctggccacggtacgccatggtggaatttcacccattttttttttttttttataatttattttgttttgttttgttttttgagacagagtctcactctgttgcccaggctggagtgcagtggcgcgatctcggctcgctgcaggctccgcctcccgggttcaggccattctcctgcctcagccccccaagtagctgggactacaggcgcccgccaccacgcccagctatttttttttagcagagacggggtttcaccatgttagccaggatggtctcaatctcctgacctcgtgatctgcctgccttggcctcccagagtgctgagattacaggcgtgagctaccg[311 bp omitted]actgaatgcatagcatgaaggcagtacccgagccaaggcctggcacatagtaggtgcttagtttgagcaggatctaaatctcgtttggtcagacccacagacacacagctccatgaacagtcgctcctgtctctccaggggaccccaggaagcacttcataaatatttcagttcttgaattctttggtgactctatacagagccgccaggaaaggtgagcaggggcgggagaggcagctttccaaggggggcggagacatgaggcacacatcaagtcactcgccagcccggatacaccaaaatgtacacagcatgaggagaagtcagtcacacagagacacagacacacccaaggcaaatacagccatgatatgtagcaagagaaaaatgagacacgtagtcacatgcgcagagacacatgccccccagagcaaacacagacacacacggacacacgccccatgacaaacacagatgcacacagagagacacacggccttaagcctcacacacggagattcaccagatccacaccccaagacagaagcaggcacgtccactcctgagaccaatacaaactcactctaagagaagcacagacacaaccagggccttcgcctaccgggggccgggttgggaggctctggagaccctcgacccttgaggaagcccccattccagcctccacctgcgcctccagggcctcccacaaaggtggtgttgggcccgtgggggaaacgctgggcgggcagagagatgggggcttccgcggcaggaggggcccaaccgggtcggctgcgttgcagagcgtggctcttgggcgccacctagtgggcacatggagtagagggcccggctgccccaagtgcagatccacatctgtgcaggtcctgggttcatctgtttctgcttttgtctatttgcgtccctgtgtgtgtgcgtctgtttcactctgtgtctcagtctctgtctctcttctccctgaatctctctttttctgtgtctcggtgtctttatctctccatccctcttttttctccccttccctcccccacggcttcccccacctccagagcctgaggcttcgtcaataagcaagccaggcatctccagtgacccagcacaccccacttatagccgcatctcttgggtcccgtccctcaacggcgtcttggtccccatgagtgtccacctgctatgactcagccaggggctgagtgagtgggggtgtgatacccaacggactctcactctgtcgcccaggctggagtgcagtggtgcaacatcagctcactgcaacctccacctcccaggttcaagagattctcctgcctcagcctcccgagtagctgggattacaggcatgcgccaccatgccctgctaatttttgtatttctagtagagacaaggttttgccatgttgaccaggctgatctcgaactcctgacctcaggtgatccacccacctcagcctcccaaagtgctgggattacagacatgagccaccgtgcctggctaattatatctattttttaatacagagtctcgctctgttgcccagactggagtgcagtggtgtgatctcagctcactgtaacttccacctcccagattcaagtgattctcctgcctcagcctcccgagtagctgggattacaggcgtgcaccaccacacctggctaatttttgtgtttttagtagagatggagtttcaccatgttgaccaggctggtctcaagtgatctgcctgcctcggcctcccaaagtgcttggagtacaggtgtgaggcaccatgcccagctgtgcccaccagttctgccagcctgcttgctcctatgttctggtctttggagcagggatcccaaaactggaggcggcttgtggccccccctgctgtgtctttgtccaaacagagccagggccctgagtccagtgtggctcgcccctccttccccagggctggctggttctagcttcctggaggtgaaagtggtcatggcatggggagaccggggacacggggacagtgaggatttggatctcaagcaaggaaaggcctgaagagagacatttgagtgttaccctcaaacccttcgaggagggctggctctcttcttctcaagaagaagaaaccctacaggctggtggtcccatccctgatcagccactgcggccccaggtccccatgttcctgcctgctctgttgctcaaaggtgctaggccaggtgcatggctcatgcctggagtcccagctgctcaggaggctggggcatgaggattacttccaggagctcaaggttgcagtgagctatgatcgcgccgttgtactccagcctgggcaacagagcaagatcccatcgctccgaaaaacaaaaaaaagggtgggaggcgtgtcctttccttcctgggggcttctgcacaccctgtttcttcttctggaaagcccttctggggctccttcactcctcatggcttaggtctgtccagtcccctcctccaagaagccagtctcattccacccccagacaacaggaacctgcaggcttgtctcagtcatggctgcatctctgccatggagccctgctcgcagtaagtacccaagaagcatttgctaagctaaataagcaagaaaacaaaggactcagagcccagctcttgagcctggatttcatcttgacttgcttggcagggggccttggccaagtgggtttccttcctgctctgtgcactgtttccccagcaatggggacctttcccggaccacctgtgagatccaccctgctgggtttcatttcagctgagtctgtaaatatttggtctgctgtggccggcagcatacacgcaggggaagcttcagtgccttttacgagctccccgcgaggcctgatatgcgttttctgtggctgggtacacggggcaccccagtagtttcacagctcgttggcacgaggtggctatgattccaagactggaagaagccgagagacaccatcagtggcttccagcacttaactccacagcgtgcagcatttgagaggccaaagaggggcctcttgttttaaaaactgtaatgcaacattatagattacagctgcagtagaaatcgagcccagcgattccccttccctaagtctatgggccacacttaatttcttaaagggcagaggggagggatttctgttgggcaaggagtgggaagccctggtttagacctgtctcttgctaaaaaaattcaaagaaccacaaccacttgctatgcacctactgtatgccagatattgcataaagcacttttttatttttttgagatggagtctcattctgtctcccaggctggagtgcagtggtgcgatcttgactcactgcaacctccgcctcccaggttcaagcgattctcctgcctcagcctccttagtagctgggattacaggcatgcgccaccatgcccagctaattttcatatttttagtagagatggggtttcaccatgttggccaggctggtctcgaactcctgacctcaggtgatctgcccacctcaccctcccaaagtgcggggactactggcgtgagctaccgtgcccggccaaaacctgctttttttttttttttttatggagtctcgctctgtcacacaggctggagtgcagtggtgcgacctcagctcactgcaccctccatctctgtgttcaggcgattctcctgtctcagtctcctgagtagctgggactacaggtgcctaccaccacacccggctaatttttgtgtttttagtacagacggggtttcaccatgttggccaggctggtctcaaactcctgagctcaggtgatccacccgcctcaccctcccaaagtgctgggattacaggcatgagccaccgcgcccggccaaaacctgtattttaaaaggctgtgcactggggagatgcagatgcctgccccaacgatgcttatgtggtggagagtgccgacaataaacaatgctttagcgagtggtcagagccacgaggacaggcaggtgtgacaaggcagagggtgatgaggcgctgctgatccagtggtcagaggagacctcttgcagggggcagaatttgaaggggctgggcatgtgtggctggtctcctcagtcacagccagtgccacgctgttcttttttgagacagccctgtcgcccaggctggagtgcagtggtgtgatcacagctcactgcagcctctgcctcctgagcccaagtgatcctccctcctcagcctcgtgggtagctgggactacaggtgtacaccagcagcccagccaattttatttttttgtacagatggggtcttgctacattacccacactgctctcaaactcctgggctccagtgatcctcccacctcagcctcccaaagtgctgggattacaggcatgagccaccgggccctggttcacagaccacccaggaagctctcccaggagggcaatgtctcgggtcctcagtaccttatgctccactgaacccggcagctgctgtgtcaatatttgcaggtggaggcaaacacagggcagctgcatctcacgaggatttgaggagtacggagaagcggctcttggtgctcccgggagtaatttaggggcagtttctggcccagtattgctgtctctggaagcactgtaggacatgtagagttatccttggggtcaactctaaaggccaagcgcatgtgcaaaattatgtacacactcacgtacgcagcttgctcactggtgccccaaacacctatcccttcaccaccgtgtgaccgcggcacggggtgccctgacaaccggggaggctgaggagaagggacctcgggctgcagcctcagctccatggctcgctacctctgggcgggtctcagcctccctcgggctcagaaccttcttctgcgcttgactttcccaggaattgactccagtttcccagggagctgcactgggctatgtctgggtttggtgatgttgtgtggcgtccgtaggtgtcctcatataaattggtggctggccagggggactagagatgtctaacttgcttgactggtaagcacatcaggtgcttcccaaagtggattctgttgtacaccagggtgacggacaaggatgcccacgtcctaatccctgggacctatgaacacattggtctccaagacaaagggaccttgcagatgtgattaaggtgaaggaattcgtggctgggtgtggtggctcatgcctgtcatcccagcactttgggaagccaaggcaggagaatcacccgaggccacgagtttgagaccagcttggccaacatggggaaaccccatctctactaaaaatacaaaaactagccaggcatggtggcaggtacctgtaatcccagctacttgggaggctgaagcaggagaatcgcttgaacccgggaagcggaggttgcagtgagccaagattgtgccactgcactccagcctgggcaacacggcacggcttcatctcaaaaaacaaagagaaaagctctcctagtccacccagctgaccaaagaaatggctgaagggctgaggtctgaacccacccagcagtgagagcagaatccgaaccctgatttgtcaccatcgtatgaccaggtaggaacagcctcacctctcccgtgggtcactgggactcaaggaagccctgcccctcaatccggcaaacctgttaaaaggcacggcatccccgttaaacgtcgactttatggttgttgggtttttttggaatcaaaaggccctgttctaactttgcctttgaaattatgtgactaggagtcatgcatgcaatttgagactggcaatcatcgtggaggcttgggagttccttgggaataagaaaatctaacctaggagctgttttgaaatgtaatgaaatctttatgaatacaaaatttagcaattggtgaagttgacacattttgtagctgtggagacatttcgtaaggtcttaattctactttttctttcttttttttttttttttgagatggagtttcgctctttcacccgggactagagtgaagtggcgcgatctcggctcactgcaacctccgccccccagggttcaagaagtctcctgcctcagcctctcgagtagctgggattacaggcacccaccaccatgcctggctaatatttgtatttttagtagaaatgggggtttccccatgttggccaggctggtctcgaactcctgaccacaggtgacctacccgcctcagcctccagaagtgctgggattcgaggcatgagccaccgcgccaggccataaggtcttaattctgattctgctgttttctttctgtatggctggagctggtcatttcctcaccgggaccccctccagacctctggcattgcatttcgccagggcccctgtgaaacatgagcacccgaggctctattcctgtagggctccccagggcctgccaacatgtattaagcatttactgtatgccaagctttttatgtggattaactaatctttgtaaagatcccatatggcaactacaatgattactccctccttccagttaaagcagctaaagcagacagtaatgacctgcccgtgggcaggcaggtagtgagaaggctgggtgccaggcagttggctcctaaacttgctctcaagaagctccctgtttctgccccagtggctctcattcccgtgatgcccccacagctccccctcccctttaaaaatgtctttaaaacgatgggaaatgatacataacaaaattcaccaccaaatggtataccaaggccaggcatggtggctcatgcctgtagacctagcaacttgggaggccaaggtgggaggatggcttgagctctggagttcgaggctgcagtgagctatgatcgcgccactgcattccagcctgggagacacagcgagaccctgtctcgtaaaaaaggggaattggaatcttcatatagtgctagtaggaatgtataatggtaccaccactgtggaaaagtctggctatacttccagaaataaaacacagggagttacaaagtcagcataggacccagcaatcccagtcccaggtatatacacaggagaatggaaaacaggtgttcaaacacatacatatccataaatgctcacggcagcgtgattcacacacaactgcccaaaggggggaaccacccacacgtccatcagcatctccttttcataacacgtattttgttccacccaccttttctctcttgaaataaaagt[144 bp omitted]tggaaccccgtctctactaaaaatacaaaaattagctgggcgtggtggcaggcacctgtaatcccagctacttgggaggctgaggcaggagaatcgtttgaacctgggaagcggaggctgcagtgagcccagatcctcgccactgcactccagcagtgacagagtgagactgtctccaaaaaaaaaaaaaaaaaaaaaggaggggggggggaaccaggacacaaacacgcttgcaggaagaaggccacatgatgaggatggaggccgagactgggcaatgtttttacaaaccaaggaatgcccagaggtgctcggcagctgtcagaagccaggaggctcaggacggagcctgggaaggacacagccctgcccacacccagatctcagactcctggcctcaagaactgagagccaatgagcttccttaggcagtctatggtgctttgtgacagccgtcctggtaactcgagtgctttgtttctgcgtggaacagagctggttccaggcccggctcgttggaaagggcagggctcttctgcccccataggatgtccagtgggactggttccctttccagctcccatagagcagcctggcagtggttgagcccctgcttcatagttcaggaggccacacccacctccaggaaggggtgctccgtgacatctgagacaccgaggtctgaaaacagggcctgctcccaatcccaggctgcctcctcaacgcaggctaagcctgccttttattgcccaacagggaagctctcaaccccaatttctagactctggctcgtcggggagacaggcaagccgcgaagaccccatgtgcaacacagaggcggcgtggcgcccagtccacctgccactggaaaatgactccagaagccgccaccgtgggggaggctccggaatgcgttcacggcagctcaggcccagacaggacgccgagggccagggccaacctgcctttcatgctctggtgtctgtggcaagctgggctggattttaacatggctttttaaaaacttaacttcccagcgggggcggggggaactccagcagaaccggcagttggaggaggggcctgcgggtggctgtcctagatacggaggggaggaaaagaggtccccagcaggtggccctgccagttaactctcaccacaccacaccgggctgggctgcccctcccgccgagagggcactaggccaaccccatgcaccatcctctgccccaagatgcctgcagcccctacccctggccagcaccagctccgctcatgcaccagcagttctgaacagaacagctgtgcctcacagtggccggcccctggagggccctggcacggagggctgcgcgcatgggccggcagcctgcgggctaccccggccagcgaagtgcctcatctggcacagtctttaaggaagaaaatgggcatcacactcaaatgcacttttgcagacaaatggacatttccagaagaacggagggaccagttctaccacgtgggcccatcaccgagtcagcgccatcccactcctaaccagctgctggcagcagacactgagcaggacacacttggcagccaggggaggggcgggcccaccacacacggaccctccctgacagagcccaccacacaccagcatgggacacagccccagactgaggtggcagggggagggctccccagggcctggcacgccctcaccactacccacgcagagacaggctcggggtaaagggattggtctgagggccctatggtgcacagcaccccctgaagaattcctagttcccatgggctgactccccagcctcagtttcatcccatgatgggaacccggacagcccacttcctgaggtggttatgacaactcagcaggatgatgcaggcaaaagactttggcagcacctggcagagccaacagtcaccatgtggtcacaccactgcgcccagggttggtcccatcccgagctctacggccaccaggactcacgcatgtgcacgcgcacgcaagactgcgaatggtaaactttattaatggaaaatggaatgcctcgttaacagaaaccttgatttaaaaatggcagaacaagaacacatttatttaaaaaaaaaaaaaaagtgagttcacattgtattgagctacaacatggtggcaggatttactttgcttttaaaaagatcccccaagttcgagggaaccctggctaccagattcaacagtgcgtctgcccacccgaaaactcgcagcgagtgggacttagtagcggcgggtgaagtgggggtacggggggggatgagggtgtgggtgagggactctgctgccccggtcctggctggccactccgccaccttccagtccgccacctggcaccacgtggccctgggaatgtccaccttgtgcaaagccgcctcgcctaggaacaaagtcagacaatttttttccccttgaagtgctcagcgttttcatcgtaacatgggttcagtaacggtcccgcagcctttagagcgcttgggttttttttccaggtgagaaaaatcatcatcgcacattgtattccaggtaactcaagagcgttatttgcataaattgcaaagagctgctttttgctttgttttcataacatccaacccagccagctgatcaaacatgcaaaaaagggagaggaagtgaggagcaggagtgaaccaccgtcctccacggacgacacaccttaccccgccactccaccgcggcttgccatgtgccccggccccgagggcccagacaggcccctctcgccacctagaagagaagaagggtctgcaaacactccgttcctggggaagcccctggacacatgtgggggccacagccaccctcgtccctggagccagccccgtaccttgccacctggcgtgctcccggctagccgcgcctgcgtccatggcaccctgccaggcgcgtgcctggtgctcctctagccgctggttgtgctctccccagtcacggccacccctttgccaaaagaaaaagacatgcagccatctaatgagcctccagggttgtgtcggcagcaggcgcacccaccctgacctcagctgcatggtgggtcatgccacacaacaagggctgcatgtcaagtgggcaaatcaagggaagggacatttccccaaagacagatgtgctagtaagcacgtgagaaggtgctcaacgccacccagaaatgccaatccgagccacaccgagatgctacctccccctggctgggatgctagaatcacacaataacacacaccgtggagggtgcgaggaaagggaagaacccttgtccactgctggtggaaatgtaaaatggtgtggccactgtggaaaagtttggtggttcttcaaaaagttaagcgcagaattaccatgacccagcaaacccattcctacctgccagaaatgaaaacatggccaaagacatctgtgcatgaatgttcctagcggcaggattcctaacagccaaagggagaaggaccccaacacccatgaactgatgagcagataacactatgtagtgtgtctggaccatggaatgttcagccctaactaggaaggaagcgctggcccaggcagcatgtggagatgagccctgaatacccaaggcttagggagaagccaggcccagcaggcacaccgcgcaggccaagaaatgactcaagacggcaaatccagagccagaaagggacctgtggctaccaagggcaggggggagggtgcagctgctaaaaggggcagggtttcttttgacgtgatgaaaatgcttcagaatcagccgtggggatggctaaacagatccacgtacacgcaaacctccactgactgcacacgtgaaacgggaagtgtgtgtcgtgtgaactatacttaaagaaagctatttgtttaaagtttcagacaaactctgggagatgaaaatccgagtccagtgtcctgagtcccaagtggccaagcagtcacagtggccgtgcaggaaagcagccagacccatctgcacgagtgcctgcctgctgtgggttgccggatgcagtgacagtcaggccaagtgagccagcccacaggcccgagaggggccaccagagcccccagcgcgcactgccaggcaagtgcaataccgccctggagggagcggaaagctcccgtgtggaacctgccctcggtgacccgatggcgcccagccgctgctcaccatgggtgagtttcccgtttacactcccgaggtatttaccataacacccagcaagcgacaggacaggaatgctaatgaagtctcacaggagagaacacttcacaccaactgatcagagcactgccaccgtctgtgctgcccagagattcaggagaagcttcgggtgtcctgggacactcggcacagcaccgagtcaaagtccctggcagagctggaagtgcctctcagcgcggagggagggatggaacgggggagcacagggggccaaaacccaccctgtggcgctgggcagggtccgaggcagccctgggccagggctggagacaagacaggacactcggctcacagaggaaagcagggcagcagccgcaaagcagtcctgccaccagcctcctcacggccagcccagacggcaacaggacaaacaggcaggggtgactgcagctggccaaagaaactagagaggcacccagagtcctcccagacaagccctgccccccaccaatgctgacaaggctcagaacagcacccccactgcagtgctggtgaaggtggctttggacacctgtggaggacctggcccagtgtcctcagccctgagtcctgggtggagggtcctcctaagtgattctaataggcaggatagggttgagaagatccaccccagaccaactgggggtcagagaaaaaacccgaggaagacacgtgtcaagaggcaacgtggaggcaggggcgaggctgctctaccacggacggggcaggactaagagcttcagcgctgtctctcccagtgtgtacgcagcccatgatcgagacattcacaactgcaggcgacccccagctcaagaatggggatgggccattctgggcgacctggacagctccatccctgaaagcctgttctatgctttcttcttgagaacctggactttctgagtcaggggtttcaaatggcaggacccctggtagcccatcctaaagctcccctagctgaatcaaaccttggggacgtgcctggccaggcaccaaccttttcccaggttaggacagatgctccccacccggctggggctcacccactaacctggggggagggggcagcccccggccttcactcagcctcttgtcggagccgtagcccccccagccatcacgggagtcccggccgtggcgctctgggggtcctccgtggccatggcggtcatctccatagtgctggaaggcaggagaggaacagggtgacactgaccatgtcacccacataggcccaccttccggaaggcctgtccactgcaggccccagggtggcaggtggggcggagctgagagaggactgaagggtgcagtctcagccctgctgggccctgcttcactgaccctctgctccctggctcccctcctcgcacccctacagctgcatcactgccccacctgagctgccccaggagccagggcaccctggcattactgccctcaacagctctgctcaagatccactaagacgtcaccaaaccctgtcttccctgagaagttgggcgccgcctcctttccgataacaggagggccctcgggtgggtcagcccccctgtgctctggcagggccacaattccggcctccctggccaaccaactctgcacggagcagccagcagccaggaagcaggcgggtgctgcctgctgttacaggccattactctgccgcccacctcccacctctccaccaggctgctgctttctcagaactcacaccctgccaccacgcacggggcacccgcatggcaccacagagactcagggaccattcttgtggtcttcagccccccgtgcccaccaagcacggacttgaaacatggggaagcccgggctcccccatccccccgaccctggcacatgtgggctaaacgacaaccaccatttgggttcttgggggaccccacaggcactaagacccaaaggctccctgagcaagtggacaatgaagagacacatgaggtttctaccggatacaatgaagaacaagcccaacatatttgaaaatgacagaaacttgagcattacaaaacaatcaaatatttgcgctttttttttttttttttttttttgagacggagtcttgctcttgttgcccaggctggagtgcaatggtgcgacctcgactcactgcaacctccgcctcccgggttcaagcgattctcctgcctcagcctcccgagtagctgggactacaggcactcgccaccatgcctggctaattttttgtatttttagtagagacagggtttcaccatgtcggccaggctggtcttgaactcctgaccttgtgatccacccacctcagcttcccaaagtgctgggattacaggcatgagccaccacgtccgactaaatatttgtacttctagtcgctggccagaacccacacttgcatacccgccacacgtgctgacttggttgccacctctctgggatcaagcggccgcctggctagaaatggtccgctatgcctgcacagcagtacagtggccccagggcttggcatcggggctctactcacctgcccatcccggtggtctcccatcattggcctcgaaccctcccgcctgcaaaaggaaaagatcccgttcaaacagcaccaggcacgactacacatttctgcaggtcaggcaagtttcgcgactgggatactttttccatcccatcacataaaaactataactggcctgggaaaaaaggaaaaagctagctcaaatcgaaaggcttttccccgggggcagaaacgaagttggatcctaaagaggtaggaataaagatctcactgaactaaaattcctcggggagctctcagttaggggaacagggacaaacagaggcctccaatgatccctcatctttggtctgacccaatgcgtgggactcatcaaaattcacaccaactccaccccaaactccagcagaattaagagtgtggcctctcagcctccctttcctgttctccccgctctgacattccgactgaaggagccaatgaatggggaaatgggtcagagatgtgcagccgaggggagcccaaagacaggattcttacactggaaaaccaagggctgcctttttaataaactagatgtattcctcattttaaaaggctaaaaaacccacccagaccctcgaaatacaaaacaggcctcatgagaaattttgcacgtcctccatcaattctctggtagctcttgggcacaaccaggttgtgctgacaaacactgctgcctcacaagagagctcagtgtagatggcctgcactcaggcccctcctggcccacctatgaaaagagtcggtggatggaatgagctctgagatgccttcctctgaggtaagctggggattccagcaactcgctcaagttctgtgcaaggccagagtcatccactgtggatctcagaagtaaacgaggcttcagagcacacaggaacccctgcactgggctgagaacgaggtcagctggatgccccggtgcccacaatgactgtagctaaaggaggggacaagaccactgacctgtcgatggcgtggtcctggtactggccccggtctcgatgatcgaagtcgtgaaagcggtggtctggccggggaaagtctgcacgatatcggtcctccattgccacacgctttccttctggccaataggcatcatctcgtctgttggtttttattttaaaagaatacaaattccattaatgagagaggaggaggaaaaaaggaggaggtggaggtggggaggggagctctctccccagacccagtatcgtttaaaatgtcctgcagggctaatctctaaacattcgatcatcattgctttgatctgataaattaaaaccgccattaacagccgagaggcacacttgtgttctcatccaacagtcccaaaaggagcactgctgtgagctcattgtctcgtgaggctgttattaccttgatcccccctcatgagcaactgaaaagaaatatttgattcttctggaatagcattcgagttgccacacttttactttccctgccttccacgggagcctgaatctccctctgagtttcttgcaaaagcaaagagaattagatggggtgatagtgaactacacacagctctggacggcatccaattatcttcttcctgatttttaccagaaaactaggctcacggagagcggggtgaagggtgactgtcaattaagccgcctggggtagctagagaccaataaacctactttctaaatcagaggcaatttccttttccacagcgcctgctctgcctctctgtctacaaggacacatgagaccggcagagtcagcggtggccaacttgggcctaacgggcgttcggttgtctcgcaagacagagaacagctatgctccacgggtaagtggagaggaaaagcatcacaaacccttcagcaagtggcagccatcaagtttcccagaataactcaagttcaggaagatgctacacagcctccggtgaggacagcgaactaataaacctgcagcagcgcagtgagatcggcggggggtccccaaggcgcatgctccatatcaaatttcattctccccaccgacagggacggaagggaagccgctgttctgctggaagggtgaacaccgctgccacgctggtctccgtcctgcccacgctctgggcgggactcaccggtccaggtcgtagggcctccgcccgggccgccgctcctgctcgtaacgcagctgctcctgctggcgccgcagctcctcgcgctcgcggtggatgcgctcctgctccttcctgcgctcacgctccacgcgcatgcgctcgcgctccagccgctcccgctccatgcgctcccgctccagccgctggcgctggcactcgagctgcaggcgttcccgctgtagccgggccttctccttccgctcatggaaggcctcgaggcgttgctcccgctcccgctgctcgcgctccctgcggggacaggtgaggctgccctgaactccctgcgtgagcctccaaggagaaagcccggtgcccaaaactgggtgtgtattggaagcagaaaaaaaaaatggatccaaaagctcaccgggcttccctaaagctgcgcgtgcagggggttaccttacttaacaaagctaccttaagaaaagcaaaggcagcacagctggcaacatttctaggtttgctcgagaacattttccaaatgctgtgagcacagcttttgctttactgagcaatatttgaggaaaagtgacaagagaacgccgggcatcccgacatgaaaaggccgaatgtcaaggcagagggacaagcctccttcaagaccacagcccagaagggagccgcggcaaaatgacaactggactctgcttgcagtttctgaccttaggtgaaaggtttcaacagggaagacaggcctcagcacccaggcaccatcccatcccatcaaagccacacacggctgggccttccacacgggccaaggtccaacatcagaggaggggcgaaaatagactttgagccagcagaaggctcagcctgtaatccagcacttagggaggctgacgcaggaggatcgcttgggcccagcagttatcagcctggcaacatagccaaaccccatatactgtaaagggctttgatgacttctttttaagagacagggtctcactctgtcacccagtctgcagtgcactgttgtgatcacagctcactgcagccttgagcttctgggctccagcaatcctcccacctcaacctcctgagtagctgggactacaagtgcacgccaccatgcccagctaatttttaaatattttgtagaggtggggtctcgctacattgcctaggatggtcttgaactcctggcttcaggggatcctctggccctggcatcccaaagtgctcggattacaggtgtgagccactgcacctggccctttgatgactttcatgccacctggcatgtctggcggctcacgtgtgaacaggtgctggcccctgcctcgaggacccaggttaagcacgacacccgccagcccaggcactggctctcgggcacacagactgcgcactccaagtacagctgggagaaggacagccaccccgagaggaaaccaccagcccacagcctcacccagctccactcaccgccgcctctccgtttcgcggatctcccgttcccgctgcctctggcgctctctctccctttgttctttgattttatcaaacgacaagatgtctctcttttctttgctttctgacttgcgatcctgactcttggagctctgtttaccaaaactggtttattaatgtcaggaaaatgattgcaacaaacaaacaatggagattatgcacgtgtgcatgagactaagattctctggccccacatggtgtagatggaaggctgtggtctccagaccagaggcccaggcataggctgcttccctccaagtttgcattttactgcctaatccagaatcctgctttcagatgtcaaggggcattcatggaagagaagaggttggcccacgcctcagaaaacctacaggcacagttcttctagcatagcacagccaaggactcacataatccaaagcaaacctaggcctctcagagccacgggcacatccgcacagggccactgtggccattagttcagaggggacagcagtcaggccagctgtttggacagctggagggcagactacatgtttcacatctcaactgctggctcaggactcaggcagacagctctaaatagaatatgccaggccgggcgcagtggctcacacctgtaatcccagcatttcaggaggccaaggtgggcggatcacaacatcaggagttcgagaccagcctgaccaacatggtgaaaccccgtctcaactaaaaatacaaaaattagctaggcgtggtggcgcatgcctgtaatcccagctacttaagaggctgaagcagaagaatcgcttgaacctgggaagcagaggtggcagtgagctgagattgcgccactgtactccagcctgggtgacagagcgggactccgtctcaaataaataaagagaatatgccaaaatgctttaatgcaaaacagtgctcctaataaggtacagaacactaatagccaacttccgtaatttattttttgtaggttttttgggtttgagacccagtcttgttctgttgtccagcctggagtacagtggctcagtcacagctcactgcaggatcaagtgatcctcccacctcagcctcctcagtagctgagaccacaggtgcacaccaccatgcctgactaatttttctatttttgtagagacagggtttcgccctattgtccaggctggtctcaaactcctgagctcaagtgatctgctgcttcatcctcccaaagtgccgggattacaggtgtgagccaccgcacccagcctacattcatcattttctatctgtggcataaagctcagagctgtaacaactgactcccatttccaaggttctccagggcccctcacccaaactggctacacatcagaccctcccaggaagcttttaaacaacacagaacctgaggcctcctgctgatccacacagaatctctggggcaggggcctgggaaatgacatttttaaaaagctactcagtttatttccctaattagcccccataggagagaaagagcgagcaatgaaaaacaaaccaacccaacagaaagacaggcaaaggtcaagatgagacattacaccaattattaataaaatgcaggctggggagaaaggggcacacagacacaggagagacacacatcacccagcactttgatggcaagctttgcctacgagacgggcagatgtcttacacacactgcagtagaataaggtgacagatgcccacataccaccgcacagtgggcagcacagcaggcaacagtgtcagcacgggactcctgggttctcaggccagcttagccacttactagcgacctggcaggtgcaacacacccaggagatttaagtcccctccacaacctttctgaacagcactttatttcaaaatttaaacgttaaaagaggctgggagtggtggcgcacacctctaatccagcaagtttggaagatcaaggcgagagaatcacttgaagccaggctaagcaacaaagtgagacactcccaccctttattttttttaataggtaaatatcatgcataaaataaaaaatatatgtaaaagcgaaaagaaaaaaaagcaaaaaggaaaaaagccaaaccgtatgtgtctgtatgtagagacctccaaggcatattacacagaaagtgcaagctccagcacatcctctgtctgtggtcccatggcaggcacaggggacgtgtgtgcagaggaagccgaggagcccaactggacacacggaggctttagtatgcccgtgctgcatctcctcaagctgaccagatgttctaatcatgcatgtgtcatcactacttgttttcaacatcacagttacatgggggtaagagtatgggtctttttcaatgttctactctacatttctctgtatcttatgattttcatgtgaaaaatgacattaggaactgatactttataaaatccaaatgttcattttaaaaactaagtcttggttgggcacggtggctcaagcctgtaatcccagcactttgggaggctgaggcgggtggatcacttgaggtcaggagttcgagaccagcctggccaacgtggcaaaatcccgtctctactaaaagtaaaaaaattagcctggtgtggtgatgtgtgcctgttgcctgtaatcccagctactcgagaggctgaggcaggagtcgcttgaacccaggaggcagtggttgcagtgagcagagatcacgccactgcactccagcctgagtgacacagcaagactccatctcaaaaaaaaaaaaaaaaaaaagttaagtcttaacaacacaaagtggtcctggctgaatatggtgaactccacattcgttaaaaaagtactgtcacctcatgaatatcttagctagaacctgcagctgggaagcagaggtttttattgtttcccagagtgaaaaacgcaaatgagacgctatttcgtctagttgtgtgcacaactcgagaggtacagctcttgatctgataacatgaccagctctctgtcctaggttggtctctacctttttggttaatttaataggagactaaaaaaccaatggaagaaagtagcctgctattaagtcaaccaaagagtaggacctgccttccggctcgaaaagcctgggtctggcccatcccaccctatggtgagctgccgtgtgaaccaatgctctgtctgaaggcggcacatcccggtcaggagccagtaagggaagcaaacacggatgggcactgctctgcagaaagcaccaggattcatgtgtgtgtctgtatccgcaatctacacaattatcgcgcctcctacaaacttcaattttaaaggcaaaacagtgctgttttcataatgcggatcaaacgggccgtggagccatcgtgagaaacagctggccctgagatggcagaggcaatactcactctctctttggacctgcttgtggttttcacgctaatgacgggctctcctttcgatttatccatcacgaccgtccgctccattcctctgcttccttcaggaaaaaacacaacaaactatcaaaacctgtggacgccccaacttcccgcagtaaacagcactctgatggaccctgggcttttgaacacacaaggcgtgagtcaagtgactgacactagccttgggagcctctaattctcatctattgtgagcaacacggtaacacgggcacagcatcatgggggtaccctcacagctctttacacaactagagggacctgttcccaacctacagcttaaacctgcagcacgcacacaagcacggccatcctgcagagccctccgtgaccctccactctaaacccacacagctccggagctggtctatgctgtcactcctccctgacattctgtgaagctccgcagtatccagcctgtgctaggaatcacactgccactctgagggagtgccttgccagacgggtgggcttccctccattcatctccagcaataaaggcttccaaaccaattatctctcctgacgacagaaccaccaggcataaaccactggaacaatgacttatttggggagatttataatacttgaggaacattttaaaaacacgttcctcgtgagactcagggtaaattagcccgagagctgaagatccagcttgtaatgtgctgtaccaaatttcaatgctccagatggttgggttttgtctctgtttttctcttccttgatgggggaggtggagttggcttatttttttttgccactaaacattctgagtctcatacagattcaaaggtgtaaagcacaatgaacctttataaaatgacaacagaagtggcatcgtccaaacagaaccacttcaacagatgcttggaggtttcatttttctctgtgtttttactacctccagctttaacataatgtgggaaaactttactgcacacctgcaaaatagcatcaggttagttacaagaaactcggacaactcactcttgcaaatcccacactacaatcagccaaaggccctgaaaaagcccaaactcaggcagctgagttcagcaatacacataagccctgagtcccaggcacttctggattcccgatgttgtatggacactcctttaagccatttcatcaacagactcttgtttctttaacactgccatatgaacagcgaaacagccatgtcaccagagcttgctgtcctcaccttccctcggaacccccactccccacccgtgccaggccttccccttccacagctcttaaaaggctctcctcacctgatttggtgactctagaccgatttgtaggtccgggtttcagctcatcctggtctttttcttccttcttaatgtcttcaggctttttttcctccttcttctcaatcttctcttccttcttaattacagttctatttaaagacatggttatcaaatttgagttcacaagactctgtaacaggaacggctcacccagagcctcgactcacacatactcagacgtccacacaaaacaaatcaccccggcagcaattaggtgggaaaaattatttggaacccatagtaataacaatactcctctttagatacaggctgtattcccacttctagtatgtgctgaattgagggatatgcacaatgaaattcctggggatgcgtttccaaaatgtcagacaggctagcacgcaagagtggtgtgcaggtggacatgagaaacacgccaactacataagaacacttctaaaaagtttaatgtttcatcatgtatgtgtggaacattgtttataagctttatagggaaaagcatttcttcccaatacagcctcaacgggatggaggcacagtggcaggacaccaagcccccactgcacagagcggcaggccatttacccgtgaggccaacacccctcgaccggtaactgctgcatacttttagggagttaaaataatgtgttatgtgccagtgaatacgggaaggtgttaagtgccatttcaaccaaaggcaactttcttctaagcagtgaaataaatcatcttcgccactcaaactcagctgctgcgttccctaatgccatttgtctcaggcaattaaactgcacaccgactcaacaccaacgacatgccagggtccaggcaggaaagtcaggcccctgcaaggccctccagcaagcacctgttggcctctcctccaaccgacccaggcagggttcccggcagagctccagccatgccagggaagcctctctgattgccccgtctcctctgcccttctcaacctccacatcatggagttgtctttaaaaaaaatatatatataccattttgagaaaaattttaaatacacaccatagtaattaatggtacatcccagaactgactattgtaaatcatctcatctcctctccctcatccctgcgacaaccaccagggtggccttagtgtcaatcactgggtctgcctgaccgcagtaatctacagtgacattttgtaagaatgtcttaggagtgacacgaacgaggccatacttcatacactgcttacttttgtcacctcatggtatgctttaaagaagggtttttaggctggtcgcggtggctcatgcctgtaatcccagcactttgggagaccaaggtaggcggatcacaaggtcaggagttcgagaccaccctggccaacattgtgaaactccgtctctactaaaaatacaaaaaaatttagccaggcgtggtggcgcatgcctgtaatcccagccactcgggaggctaaggcaggagaattgcttgaacccaggaggtggaggttgcagtcagccgagatggcgccactgcactccagcctggcaacagagagagactccatctcaaaataaataaataaataaataaataaataaataagaaggacctttagatcctgagacagaacttagggggaataaaaagggtctgactcctttcacctgctgcacaaaattctgtgtttattcatctgctttccttccagtagataaatatatatgctggaaaaaagactggaaggatatccaacaaaaagcatcatccctaggtgttgggattacccctgacatttacatgtgctttctgtataacaactgtataaaaaccaccactcatccaagatggcaaaggctagcccctcttcttcccctctttggaaagcttctctatttcacaaggccaaccactaatctagaaatccttcaaatggaagggaaggctaatgaaggtgttaatttgaagaaaaaaataaggtcaaaacaaatttttaaatgctcaacctcctaggcaaacaacctgcatgcagtttggtcttaaagatcttaagttcgccgggcgcgatggctcacacctgtaatcccagcactttgggaggctgaggtgggtggatcacgaggtcaggagatcaagaccatcctggctaacacagtgaaaccccgtctcaactaaaaaatacaaaaaaaattagccgggcgtggtggtaggcgcctatagtcccagctactcgggaggctgaggcaggagaatggcgtgaacccggga[146 bp omitted]cataggttgaatcccagccttgccgtttcccagcaaactcaggcagggcgcgctcccctctctaggcctgtatcctctcctacatagagcaagtgcctcacagggctactacaaggaccaaggaaactgctgcattcccagtgctggccacaggaccacaccatactgttagctaattattaccgcctttcccacaaatacagaaaaacaattaatgaaacacgcaagataccaagaacaccgcaaacctgcaacaacagttccccatcttccaccaatacagacatttttttcttagcaatgctgatgggatgtgtctttttgaagttgctgattaaattagagggctcaccgccccccccacccccctcctccaagttcatgaaggctcatctgacactcattactcaggggcctactgatttcaatctggggccaggtgcagtggctcacacctataatcccagtcttttgtggggccaaggtgggaaaattgcttgaggccagggtggaaaccaacctgagcaaaagagcaagaccctgtctctatcaaaaatttaaaaattacctgggagtggtagcccacacctgtagccccagctactagggaggctgaggtgggaggttcacttgggcttgggaagtcgaggctgtaatgagccatgactgcatcaatgcactccagcctgggtgacccgtctcaaaaagtaaaatgttttttaaaaataataattccaattaaaaataataattccaatttggccatgatgtaaattggtaattacatcttcaaaaacccagttcaactatgtccacagacatgtttaccctctaaactgcgttgacaacgtaaacttaaggcagacactcagccttctgagacactgccatgatcagatacaacacggaaatctaccttctcaaaagagaagcctacaattgtgttaaaaatataaacaacccacacctcccttgaaagatctgtccctacctccattttgattaaagatataaatcacccctttataaaaatagaacctcagacccatggttcccaactactacgccaaggtacgccaaggtaccccaaggtgccaccgtgaactcacagggtgccaccgtgaactcacagggtgccaccgtgagaactcacagggtggcactgtgaactcacagggtgccttggaatatttttaattttgaggtaaacacagcaatgcttttgccatctgtcagacacagcaccaactgctcactcaaggtcattcactgcaacactagaccaggctaaattcctttggatgatgctttatctttgaaaaactgggtgtatgacagttgctgtgattaataagtgagaactgcatgaaaatcaacgtggatgaggaaatgattccaaggtctgagaggctgtacaagggaccagaatatggaaaatgacattttgtgtatactgttttttcaaaaggctaatcagttatcaggaaacaaatacatgctgaggatcaactgtatccacttcttaaagacatgggctacttcgttaaatagctttacacagaaagctgaagactggcagggcgtggtggctcacacctgtaatcctagcactttgagaggccaaggcgggcaaatcatgtgaactcaggagtttgagaccagccttggtaacatggcgaaaccgcgtctctataaaaagtagcctggctgggtggtgtacgcctgcagtagtcccagttacttgggaggctgaagtaggagaatcacttgaacccggaaggtggaggctgcagtgccactgcactccagcctaggcaacagagtgagtccctgtctccaaaaaataaataaataaaagctgaatattaaagtggcagcagaacacaaaaatcagctgagactccagcaggaagctggcaaggctgcgtgggtacaggtggggacagatgcgtgtttttcaaggcccatggtggctgcccgtgccctcctcccagggattccaagaggaggtttgaaaattcactttacttttcaattttgatctccacagaatgatgtctgtcgacactcgataatttttccttcttcacttcgcactcttttctgtcggaaagctttttcccagcaggctcatttttggcctaaaatataatagacagaaatgatgtgtggcccagagcttctcacttgcaaactccatttgcgagttaccatagacgagaactgcctcaccttctctacggagatcattcgtccatgcagctcagttctgtggagatggctgatgcacttggtcgcctcgtcagatgtcgacatggtgacgaatccatagcatcgagcccccgggctgcgggcgttcgttaccactttggccccgacaaccttcatgaaaaagggcactcttactctctcatacaaatgaccacacaacttgctaaagttattacctggcaatcagaatcattttcactatttgtcacctctccccatatggtagttttccattttagttactgaattggttctaattaatcctgacctatccaaatacaattgctttttttttttttgagacagtttcgctctgtcacccaggctggagtgcagtgtcgcgatctcggctcaccgcgacctccgcctcctgggttcaagcaattctcccgcctcagcctccgaagtagctgggattacaggcgcccgccaccacgcctggctaatttttgtgtttttagtagagatggggtttctccatgttggccaggctggtctccaactcctgacctcaagtgatctacccaagtcggcctcccaaagtgctgggattacaggcatgagacaccgcacccagccactaaatacaactgcttttaatacaagataagtcatcacaaggaaaacacacaaacatgcaaggttataaaaccattaaacttcattactcacaactaataaccagaagtcctacccatccacattgttttctctatttccactgtgcccacaaacagctgtggggctactaagaaatgcacccatccactccagctgggcctgagaagagctctgacacagacatggactgtcagaaatgtccccatggggaaaggacttccacttctggctgagatgggagaactaagcattgtcttcctgcctgaaacaactaacaaatgtgatgaaacgtaggcaacgacagttttcagatcctggacatcaggctgcccaagacaacaatccctgagagctccctgactgcccctgctcactgcctagattcccaggcaatgggggatgggtaagacagcactgagattctgagaccaagacagagagaaatcacggaactgagtatcagagaggacacagccacacagagccacgcagagcaagctgaagagacccacagagggttcctcccacccagtgcacacgtgtgcgaggaaaccagaggctgggacagcaccacccataaggagcagagggaacaatcaggagcagagggaacaaccactggaggggcactcagggccacaaatggtttgctcttcccaatagccagggtggaaaggctggtaattcacgggccatcagacccactactcagagggcactgcccagtggtgagacaaaatcagcccaaactgaaggctactttggccctgccttagtgtgtgtccagtacctcagctgtgtcccagaaaaaagctcaagggtatttgtagagatacaagtataactagcacccaaaaaatacaattcacaacatccagtaaaaaattaccaggcacaggctgggcacagtggctcatgcctgtaatcccagcactttgtgaggccaaggcaggtagatcacttgaggccaggtgttcaaaaccagcctgggcaacacagagaaaccacatctgtaccaaaaattttaaaaattagctgggtgtagtggtacatgcctgtggtctcagctactcaggaggctgaggtgagaggatcgcttgagcccgggagctcgaggctgcagtgagcaccactgtactccagcctgggtgacacagtgagatcctgtctctaagggaaaacaaaacaaaacaaaaaaaccagaagaaacttaaaagcagccacagaaaaagagagagaaaagacacaaattggtaactgaaggaacaaagattaaattaacctagaattctatacccagtgaaaatttatttcaaaatgaagacaaagtaaagactttttctgacatgcaaaagaaacaagaacgtatcaccagcaaacctgcactacaggaaacattcaattccttcaggagggaggaagatgatctccgatgggaacttggatatacaacaaaaagcaacgaagagcacctggtgaggtgaacatgattttttcctgtcatttctgggtctctttaaaatataactgtttggctgggcgtggtggctcacgcctgtaatctcagcactttgggaggccgaggtgggaggatcacgaggtcaggagatcaagaccatcctgactaacacagtgaaaccccatctctacttaaaatacaaaaaattagccaggcctggtggcgggcacctgtagttccagctacttgggaggctgaggcaggagaatggcatgaacccaggaggcagagcttgcagtgagccgagatcgcgccactgcactccagcctaggcgacagagcgagactccgtctcaaaaacaaacaaaaacaaaaacaaaaacaaaaaaaaacacaactgttcaaagcaaaaaagccaaaccacaacaagtcaaagccaataaaatattgggtgacttcttaaagagaagtaaaccgtatgacaataacatcacaaagatcgacgggaggggaaatgcaagtatattcccacagagttcttgcactacgctgaaaccaacagagcaccccttgcagacagactgtaagggaagatgtgtactgtaatcctacagtaaaccacaatgacacagagttagagcaaataagccatcagtcataaaaaggactcgacccacaagaaggcagataaatgggaaaaagagatcaataaacaaacatgaacagaaaatagagaacaagacagtagatctaacgccaagcccaccaccactggcgcgcagagtaaacatttccccgggacacaggagtcctggtctctgccctatctctgactcagggcatcaacctaagcaaggcattccccgtctctggacctcatggccccaactgtgaaatgacaaggtggaacccacaagcttgaggttcccatctgacgtccttggttttgaccacacaaatggaggagtcaaggctctgcctgaatctgtccagggccaaagggacagaagactctcctgagagaaacacagatgccacttcccattctaccttcccatcaaattaatcatccttacaagtatatctcttctgatgacagacaaaacccaaatgagagcaggcaccatactaagcttgtatgtccctatccctgagctatgccatccgccctggaggctctgcatacttcagtcaagtagctgagtggtgtcctgcccctctggccttcctacgtccttctgtttttgtccagagctgagccccacaggtaaggccaactctgtcactcacgcctcagctgaatgtcacttcttcagcgagctctgctgaagctgcctcccaaatctaaacacggcctccccaacacactgacggcgtgctctaatattccttaatacgctcatcacaacacatcatatgtgtttatttcttaaatggtctttttcccgccagactaaaaaatctgtgatgacagtgaccacgtatgtttacctctgcttaatcatcagtgtccgagtgaagtcaacaaagtaactgaataaacaggttattcatggctataagaatttcctaagcccttgctgaacacacagactgttcagagaaaaattgaacagcacgctttctccgggtcctgtccgcttcttaagcaatgaaacattaaccaacacctgatcgggtgacacagacctagacaaaggaacggcttctgtagccagaaaactgtgtcagacagggcccactctgcctggaatcagggcaccctccagacactaaatggtccgaaccttgtcccttggaagccactccccagaggcacccaggagaccagggcagtgccaattgcttaccagaagactcttggctaggcgcggtggctcacgcctgtaatcccagcattttgggaggccaagcaggcagatcacataggtcaggagttggagaccagtctggccaacatggcgaaaccccatctctactgaaaatacaaaaattagccaggcatggtggtgggtgcctgtaatcccagctactcgagaagctaaggcacgagaatcacttgaacctgggagggaggcggaggctgcagtgagccaagatcacaccactgcacttcagcctgggcaacagagcgagacgcagtctcaaaaaaaaaaaaaaaaaaaaaaagaacaacaaacaaacaaaaaaagaagactcttaattaatttcaaacagtggaatcattttaaattgtcctcaccttcctttggaaagctgctgaattgtactatttttctcccacccccatgagcagcatcttagtgatttatttttgaaccacgatcatgttctagttatgagactatatacttaaaatgctaaatgatatgaaagtcaattattcacttcattctttttttttttttttttttttatgacatagtctcgctctgttacccaggctggagtgcagtggcacaatcttggctcactgcaacctctgcctcctgggttcaagtgattctcccacctcagcttcccgagtagctgcgactacaggcacagaacaccacggctggctgatttttgtatttttagcagagacagggtttcgccatgttggccaggctggtctccaactcctgactttaggtgatacgcccgcctcggcctcccaaattattcttaagggaaaaatctcatcatgtaagctttaagttttgcacaagacaaaagaccaccagtctctttgagaccagttagaaagaaccccaagaacattgagagagaagctgtttatacagctgttctgagcactgttgtgatatgaccaaccacctgccctgctccgcaccctagttactgtgagtcaggaaacaaggtgcactgcacaagactgggcgagcttcgctgctgtcgttccattttttagtaaacacaacatcttgctatgttgcccaggctggtcttgaactcctgggctcaagcaatcctcctgcctcagcctcccaaactgctgggattatagacgtgaaccaccgtgcccagcagagcttcctttttaactctgaatcacagtggatggtatgaggcaagggaaggcataccttcccatacttgctgaaaaggttcttgagatccgtagcgcgtgttgtggaggacagcccgctgacccacaggttccgaccagaaccgctgccgacccgacctggcacgagagggagattcttaggcatcaccccaaggcctaacaggaagcacaaccattcttaagaccgcagccctctttaaaaaccctaacgacgcccaatcccaactgctgacttaagaatttaacgcacacacacatgccaacacacagaaggctgaaaatctggacagcaaaaactgagtttccttactcaaggaataatcatgcccatgtcagttatgaactgaaatgtcttttgatgatcagatctcatccaagacggcagtctctaaaatccttgaaacagtcttcaatgagcagaattattcctttcttgtaatgtgcttttcaccatcccatagatgacaaccacaagagaaacataaaatgcaggtgcttgcgaacttctaaaactagtctctcaagaaaccattaggtggttgattccggtaacccataacaaaacaaattactgaatccaaagtgtgtatatctccaggcccctcctcccaaaataagggaaccatacctggctccctaccacgttaaattaaatcatacctttttcatctttaatgattggctttatatctttttcttccttaaaagagctagagacaaaagttaatgttactcatacaggaaaaaaacgaaagagaacaaaactaaaaatatgattatgtgctaaaactgaatacctaccagaaaattagtctgaaataaaattttaacagacacctctgcaagcttatattggaaaatctgaccccaaaaatacaatgtcagatttgtaaaagtcaattcgatttagctgaagataacaattaacaatttaagaacacaaccatggtaggttgagaaaaagaaaaggaattgaatcacccattaaaaacacacaaagagaaacgaaacattctttagaagcaaaactacaatttcgtcagtctggctggccaattgcagaaaaaaacagcttatgtgtgtcattacatgaccaatgaaaaggagatagcgtctggtctaaaactgagaaaaaacaaacctcattttctgatcagcgccctcactggttgaggactctttaggagccggagggacttcattacaagcgtcaaaatcaaacttcctcccgtcttctttgctatctctggcttctgggcttggggcttccgtgggtgcttctgcgagctcctcgctagaggcctccgcgagctcggaggccgcactactctgctcaactgccggctctagccctacaggctcacagtccgtcctctcgccatcgcctggctgctccgcgggctcccttttcactaccgctaacaggctgtctgccttgctcgactgagcgtgtgctgttgactcgctggccaaatctaaatcaccctcttccggatgggcgctgtcaaataggtcctcttcctccgcaagctttctgtctggccccacgctacttgtgtcctgtgcaaatggctgctccagctcggaactttcttcttttactggctcagatttacaagtttcccccaaaatgtcgagtattttctcattttctacggatttaacaggaatagaatggcacaaggtttaattaccagggaaataaagcaatcacaaatgtggaactggcacggctgccacactaacacgaagagaactgctagctacacagagattggaaaacccgcgggtacacaaagttatactggttacactacctgcgccgcgaccgcctctaggtaagcctctacgctacacggaagagaaaaggcccccacagatttaaacacctacaaccacgcggctggttctcaatagtcttcttcgagtttttgttcaagtctgggtcttctgactgattttccaatgtccaaggtgctgaaccgaatgcaatcaccattcaatgacagctcaacttccaaatttctttgaatttcttttaacagaacaatccaatatgaaaatcagaatctcttctgacggtgggagataaacgcagtccggaaggggaataatatgttgaaaattttcacggagaaactctgtttcctcttctggaatccagtcacttctcaggtggtaagtgccctgacaacagctttatcctgccttaactgcgttaatcaaaatgactgcagcaaaatatcacaagatctgtttcatgtgtagaaacacatggaggaatcacggggacgggggaattaaatgccactctacgtggttagacatgaaaagaatcactactacattgcaccaaatgtatttgacctcaagaagccagaatggctcttccacagatctggtgatacgaatgggtttccaatctctgatccttgtatgatctggattgtccaccattagagcaatttacaagatcataacacagcttaaaatatagacagctttaaaataatagtgtgaaaactttcaaaccataactgtcgtgtttctcttatcagtacctggctccaaaagggattcttcaatgtcctatttaaaaaagaaaaagcaaatccacaagtcactttaaacacggggcacatacatttcaccagtaaatatggctttcaatcatctgtgaataaatgcctgtttccacaaaactttcttgtctccaaaaaatgtattccatcctacaataacctgatgaaaaccagctcattttaacagtttccctggtaacagcaggtccctagtgataacagtctgtcccattctcccgagtttgggccctgccctgccatgccacccaccccatgaccaagctgacctagtggctgctgcagctggcaaacaccccctttgtcagagaagaggtcacagtggatttaagaaaaaaatacttctcccaacataaactgatttgtaactgaaacctgtcataacaaaatgatctctctactctgctgaaaaccttttccgacatctgtctcacttaggacaataggtccaatccttctggtggcccagactcagcgaggcgggcccagctgctctgcaacacctctggcttctatccaaccctgtgtgctcccctctctcttttgcatcagagacaccacccaaactttctgctccaaattcttctttccctcttcaacctatccgtcagacctctgggaagagttccaggcacttatgaagtccaaccaccagaactgctccctcatcacacttctttctcccttctggttacatatttggtttgatcccactgcccctgctagatggccagccctgagactgtttctcttctgctaacctcttaaccccagcatccagcacagtatccagtcatttccatacacatacacactgctctttcattatggaaaatcaaccactcgattaacatttccagcgatgcagaaccagatggtaacttaccggagttactttgaagttcaacgatgaagtttccaaagtgttcttaaatccttccccatccacctgaaaaacaaaatggaagatgacttcgtggaggctggagctatgaaaaccaaggctgacacctcgcttaggcaacttgtgtgtctatttccctcacggcaccttttgccatctgcaagtctactgttgggtcattcagttcagcacctgcctctccgccagaacacacactccacgactctgctccaccagcgtctctggcagtggcctgcaggtgggtatgccctgtctgtactgggtgaatgaacgaatgaatttcccaggcagtttctaagtactggtgattaccacatacccctccaatcacaggatttccaaagcagaactcaaaatgataaaatgcacccctccaatttcacctggtagcaatactcttaaggtaacactaaccgggcactttctcctagcctactttattcattcattcattcactcattcatttgagacggagtgtcactccttttgcccaggctggagtgcaatggcgccatctcggctcattgcaacctccacctcctgggttcaagcaattctcctgcctcagcctcccgaggagctaggattacaggcatgcaccaccacgcccggctaattttttgtatgttttagtagagacggggtttcaccatgtccaggctggtcttgaactcctgacctcaggtgatccgcccacctcagcctcccggagtgttgggattacaggtgtgagccaccgcgcctggcccgcctagcctactttattaaaaacaaacatctaacttggtcaatttctctctttactacatgccaaacaaaagaaaaactgttaacaccaagttttactaaatctgaagctctttttaagtgaactacaaaaacagcactcccaaatattttcttttttccttttctcgatttgaactcatgacctgggatgcctccattaactgagaagtacacactctgaaaacaataagcacacagcagtaccagactgagaaaggcggctaaccagttgctcagtgctgccctaggtcaaaggatggtaaatttggaggcaatgacttttgaccgtaaggtttaaggttcagtcctatggaggcatttccacccccaagctgaaagctgcaatgccttaaggaaacaaaacaacctactgggcacgtgacatcagtcagagtacaatgaagatcagctcgaagacactgacagcttgtgatatttgaacagcctcaccagagagctctacgccaaaacactagaagtgaaaagctgggaaagccctaacagagcaaagttcctcctttacatacaaggatgctcacagtcagtccttttggggagcagggttgatacttgtcttcactgtactttacatcttttaatgtaactgcttaaccttgcttaaaacaacattaacaggctaggcgtggtgactcaccactataatcccagcactttgggaggccgaggcaggcagatcacttgaggtcaggagttcgagaccagctcagccaacatgatgaaaccctatctctaccaaaaatataaaaaattagtcaagtggctgggcgcagtggctcaagcctgtaatcccagcactttgggaggccaaggcgggcagatcacgacgtcaggagatggagaccatcatggccaacatggtgaaaccccatctctactaaaaatataaaaaaatcagctgggcgtggtggcgcatgcctctggtcccagctcctcaggaggctgaggcaggagaattgcttgaatcagggaggcggaggttgcagtgagccataatcttgccactgcactccagcctgggtgactgagagagactctgtctcaaaaacaaacaaacaaacaaaacacaacattaggaggaatatctacatgatgagattagaaaccatttttgagctgggcacggtggaccacacctataatcccagcactctgggaggctgaggcgggaggattgcttgagctcaggggttcaagatcaacctgggtaacctagtgagatcccgcctctaaaaaaaaaaaaatttttttttaattagctgggcgtggtggttcactgtgtagtctcagttatgcagggggattgcttgaacctgggaggctgaggctgcagtgaattatgatgaccccactgcactccagcctgcacaacagagcaagaccctgtctctaaataaataaaccatctttgcttcttaaaactgtattttaaaaggaaaaaactaaatgggcactgtggcctgtgccaataagcccaggtagtcaggaggatcgctggagcccaagagttcaagaccggcctgggtaacagttgagacctcatctcagaaaagaaaaatcttttatgtcagagctttctattttatgactcaccacatgcttcgaattataaaaacactccccagtgctacagaaaagctatctatgagtaaatccctgagctacacagcgtttaaatggacatggtttaacaccagggtgtagaagcagaactgtgtgttcatggcggtttagctgtgttctccctcacacgagcagcacgcgagcaccaggtgcctcggggctatgggcacatcctgccgtgtctccaagttacctacagcatgctctgggggctgagccgggagctgtctcagctgtgcagccacgtattctttactatcacaaaaggaatcgagaaggccgtccgtgccatcctccccaaaatctggagcactgctattcgccacttcagtttcgtctagcacactcatgtccatcatgcccatattctgcaggttctccagacttgcttccatgtcctcctgtaaagaggaagaagaatcgttaacgaccacctggaccaggacagggagctgctgcttgtcatctctaccctgacatcacttacctgcccgtctctggaatcgtcttccaggccattatcttctgtgccttcctcctccatcttcagtcctaattacagaataattgttcaatcagataacactcaagttctacctcataattagtttatgcagaatagatttcaatcttagaacagaacacattacaagataaactataagtctcccctctcctgtcacacgtaattttgtctcaatttgttttcttttttttttttttttttttttttttgagatggagtctccctgtgtcacccaggctggagtgcagcggcacaatctcggctcactgcaatctccacctcctgggttcaagcgattctcctgcctcagcctcctcagcagctgggactacaggcgtgcatcaccatgcccagcttatttttgtatttttagtagagatggggtttcaccatattggccaggctggtctcaaactcctgacctcgtgatccaccagcctcggtctcccaaagtgctgggattacaggcatgagccatggtgcccggcctcaattggtgttctaagtaagccatcaacagggagatgaaaatctaggattcctcttagattcagagtactctgattttccacaaaatatctaaaagtttccaaatatttcaaaaacactccaaacctaagaaaaaaaatcacaaaaaaatgagcaaaggataaaaacaggcattttcaacaaaccaacaaaaaaatgcaatacccatctagtaaccaaagaactgcaacataaaataacatattgagttagtgatttgctggctctccctatattccacccatttcaagtaggtctttgtcattttttagctcaagaacttttttttttcccccaaggcaaaaaggcaaaggctgccataaagtcgagaatcatcctgggttttgtgaccacaaaataactatttgatagaattctgctaggaattgcaaaaggaggccagaggagttcaagagtggaaaccttgagaagaaacttgaggctctatatgtatcaaaaaccttacaaatgtgcataccctttgttccaggaatttgagtcttaggatatctgacaaggagttcaaaacatagatatctgtcctattatacctgttaaacacccaaaagggaaacaaattacagcatattttcattcagatatggttcacaaccggggggaatggctggcaatgtctggagacattgttagtggtcatgacctgggggaacgccattagcatcagtagctagtgatgctggtcacgaccctgcaatgcacaggatactccccaaccccagagaattcttcggcccaaattgtcaacagtgccaatgctgagaaaccctgtgggacaccatccaatgtctcacaatatttaaagaatgtatgcttttaaagaatatttaatgaaacagaaaaaatgcccacagtgtaggcacagtggttcacgcctgtaatcccagcattttgggaggctaaggcaggtggctcgcttgagcctaggaattaagagacaagttcgggcaacaaagtgagacccccatctccaccaaaaatacaaaaattagccaggcatggtgttatgtacctgtactctgaattaccggtgagaatgaggtgggaggatgctccgagcctgagagcttgaggctgccacgatcatgccactgccctccgctctgggcaacagagtaagaccgagtctctctaacatacacaccgataaagaaaaatcaaacagaaaaaaatacatactttcccgtctctactaaaaatagaaaaacagccggacgtggtggcgggcgcctgtagtctcagctactcgggaggctgaggcaggagaatggcctgaagccgggaggcggagcttgcagtgagccgagattgcaccactgtactccagcctgggcaacagagcgagactccgtctcaaaaaaaaaagaaagaaaattaaacataaaaaacctgcagggtctacacctcaagagtctcactcaccactattatcaataatcactcaagaaatgcagtttaattgcatgtctcgcaacgtgagctttttccagtctatcatttaagacgcctaacaacgctagcaggttttattatctgcatttgacacgagaatttggttgagctccaaagctggcactctaaaactcagctgtcccacttcgcattatatctaaacacagcatatccttttgaaatacgttgtctaaaaatgtttggtaattgcacccaatttctaggcccctaaatagtagcctgcagtgcccacataggccggaaataggagaaatgctgaccaaaaagcatcacagaaaagctaatgtggcgcagacaggcgacgccccaatccccggcacctggcattggccaacgaaaagctgccgctgctggggacacagatgtaagaaaatccaactttaatcccacatggcatctaaaacttaaatttttaatccaagttttattttttccaaacccacctacaatgttgcctaggactcctaatcttggtgaagacccttactctgatttataatgaggacacttttccctcaacaagtttggctacttcagtttttgcaaggaagcagttactggtgagttcccagaatgagtccaactttggactcaactgaacactgctgcatagtgcttgaaacgaaaattaactggtgaattcctcctgatctaacagttgtatgtaatcacaggccctaactgcaaccacaaagtcctaaggctcttgtgctttatccattagccacgtgccccgacacctctagagaacatcaccagctcaggatggaagatgaggcctgcagggcctgagcaccacctgaagacctgggctctctctgggcttggttacttctctgaaaaaggaatgggaagggatcagaagcccttctaaccctcactagagctgaggctacaaaagtcctttttatagcaacagaagaactttatcatccaagctttcctgacaaaacactaactccaagtagttttgaatccacctaagctttaatctagacattcaggcaggtcttcaaagcactcagctaaagtttagtttttctaatgatgcaaagatcattagaaatgatccctgctaggccgggcacagtggctcatgcctctaatcccagcactttgggaggcccaggcgggtggatcacctgaggtgaggagttcgagaccagcctggccaacatggatggtgaaaccacgtttctactaaaaatataaaaaagtagctgggcgtggcgacgggcacctgtaatcgcagctactcaggaggctgaggcacaagaatcacttgaacccgggaggcggaggttgcagtgagccaagaccgcaccactgcactccagcctgggcaacaacagcaaaactccatcgcaaaaaaaaaaaaaaaatccctgttaaattcctgctaaaagccaaggatattttgagtagtaagtcttgaactttacagttttaaaatgagcacctacataaaaaacttttaaactttattgttaagcagttttcccaaccactaaaaaaagaaaattcacatcatgcataagttaacacctaaacagaagagataaactatatttcctgcgtagaccagtctctcacattctgaatgtgctcaggctgggccttctaggtgaaatacggacactcacaagaacagcaaaaacgcatccatgtgtcaaaattaaactttaacttaaagctcttatgcaacctaactaaaagatttaatctttcaaactacatgcacatgttttaaacagttaatgtgttatgaaacacattaagaagaaaaagctattaaaaaaatgaaattgttaaaaatgctacaatttctttctactttctaagcactgatcctccactgcctgaatttagcacttttccaagaaaacaggccccctgcacaggaaacctaaattatattatccttatcaccataaaacctaacaataccaactgggatagtcaaagcttcaaagttttatggaattcaatgctttcaaaaataactggtatcagccataaacaggaatgaagtatcaatacatgttacaacacagatgaactttaagcattatgctacgtgaaagctgatgcaaatggccatatgttgtacaattccatctacatgaaatgtccacaataggcaaatctatgcggacagaacatggattagtagttgccaggggctggagggagaaaagtaaggcgactaacttctaatgaggaccgggtttcctttttgggtgatgaaaatccagaaggagacggtggtggtggtggcagagccttgtgtatacactaggaagcactgaattgtacaccttaacctgatgaatttaacggtctgtgaattaaaccttcacattcaaaaaccgtaatagtaaaaaataggctgagtgcaaataccccaacaatctactttggaccctagcaaagctgagttctattcggtctcaggttggtgtccttttctttgggttaagacctattttttgaaccaggaaggaagccaagtaggtacatttggttcctcagacccgtagaagtagctttaagagcttgtctttctctagttgacttttaatcccaatggcagaagctgaaacgtttttcgtatattttaattgcacttggcacctgtacatctctttcctcctccctgtgcccttgacagagctacctgttaggtggtgacgagcaaagctaactcttagtggagggacaccgagtaccagagaaattctcccagcctagaaggcgggaagagcacactacacaccatttctctaaattctctgaacactcaagccccaagcagcatatgtacaatacctttaacacatctcttggctgacttcttgctggtggcttctaactcgatgccaatttcatcaggatcttgcccctcttctttaaccgcctattagggagagatgagttttacaacatcattaagagctgcagggcacacactgttccttacaagtaacaacctcccatgaaacaaaggcaaacccgtccttgcaaagagcaactccgggtcagctatctgggccgcaagcccaaaaggcggaggaggaaccccgcacaacttgggtctctctgggtccaaatgacaaaggagagggaggctgtgagcaggagctccagaattggggtcaaggaccagttccaaaatggcaactcaactcgacaatgccaaaccttcgactttaaagttatatgatgggacaaattagaacagagaggctgcacttggcccggcctcggtgaagggctggccaccgctggtgaggaggaacagcagccagcctggggagattcaacaggtccctcagtgcctgccacctgccgggtccaggactgggtacccacaagctccctccctatgctcaagttgtttgttccagttgcggaaacagacaattcccaaccccttaatattttgcatttagcccctgctttcagcgaggtgcgacacaaacgcaggatgagctggcaaggaggtggggcagcgcattaggaagggcgctcaggaaggtgatgtctcaggcagacccaaaatgacaacaaggggccggccacgagaagatctgggggacccgggtggacagcttcgtaaaggccaaagccctggggcaagaacaagcaccgccccctttcctgtaaatgctctggagtccgccagacacccattctccggaggaggaaactgaggcacagagagaaaggcacctgcccaaggtcacagagccaaggctcgatcgggagccccaggaggggtcccggggccaccctggtagcggagaagaccgcacgctgagcgcgcttgaggagaaaaggtggaaagaggataggaagggaggcacagagaggagcggtgacgggccaaggtcacacagccggccccctgggtgcccgacacctcgaaccggggtcggccaagacgcggggcgaacccagggcgccccgggtccgggagccgcggtgacaggtgcaggcgggggcgtgcccgggcctcctgcgccacccccgagccccgcgccgcctcaccttcttgagccgctccatcaggacgctcttgttgccgcccgtgtccaggttccgcttcttcagctccgcccgcagatcgatcacccgcagctcgctgagccgcctcgtcccagtctccgcaacgcccgggccgagagaagccgtgccagggcccgagtcgcccgacccgggcagagtctccgccatcgtcgcgttcccgtcttcgccaccgactcagtcgcacaccgccggcagctatagcggctctgaacacaaaatggcgccgcctaagaggaaaacgcactcgtttcctcccgccccgctttgcggccgcgcacgcgcacgcgcaccgcccccactagcgtacttagcagcaaggacgctcgcgcgtccaccaaccgcgggttccccggcacaacgcgcaagcgctgaatctgcagctcgcatgcgtcccggcagttcccggcgggaggctgacgagacgcaacgcgtctgcgcacatccccgcgttgttctcactgcgcatgtgcagttgcaaccgggatactagaacctacgcttggtgcgcctgcgcagaagcgaggcgcgctggggcgactggagcggttccctcgcaggcggcgccattttgtgctaggagcctgataaaaccggcccggttctgtggaaagtgggcggcggagccagggtccctggaatggcggagactctgtcaggcctaggtgattctggagcggcgggcgcggcggctctgagctccgcctcgtcagagaccgggacgcggcgcctcagcgacctgcgagtgatcgatctgcgggcggagctgaggaaacggaatgtggactcgagcggcaacaagagcgttttgatggagcggctgaagaaggtggatttggggccccgagggcgggcacagggtgggtctggggtcctcttggccgcgacggtggctcgcgggccctggcgtccgcccccggccgcgttcgcggcctcgccggacctggcgctctcgcgtcccccggctcctccgaggccccggagagagttccttggccggctgggcctgggttcaaatcctaacgccgcaatggggccaggagaaccacaaaaacggcacgcgtgcaggagaaacggtgacgggtgacatcgtccactgagaggagggttctcccctcgtctcgtcccctcctccgtacctggaggggagaccctgaaaccctcacttcccaggcgaggggaagggactcggccaaggtcacacggccgaggacgggcagcgtcgggatttgaacccaggccctgggattcctgattcggctgcttggtttccccagggaagatgctttgtgacccacaggggaccgaccagcctgaatcggggctgatttacaaaggaaacacccgtaggacatactcaaagggaaaaatagaaaaaaacccaccacaatccagttttcacggtttgccggtactcgctcggtgaagtaacgtggcaggaaggaaaagtggtgttgacggtagtgatcagaaatgtgaaatgaggggagaccccgggtggactttaaaaccagcctcagaactgcccgggaggcgggcagagcctgggctcccccagctccgtcagtctctctggacttggggaccctgccagctctcggtggcctgatcttgggcataggagaccttgaaccccttctgagtcctcttttctattctttttttttttttttctcctgtaagaagcaaaaaagcaataggactttgatttggggattaaataagtttgcgtggagcaggcttggcgtgctgcctggcgcatgtaaacactcggtgtgtggttgccatcacgattcgcttttcctctctgtgccaccacgagtcctcatttgcagatcgggggctctaacgcctcccttgggggattcaaagggatccctaggaaaagcagagaggcaagtaaaggttagccacctgcggtttccttattcctgtagctttttttctctgccttttttccacctggctactctgggacctctcccctgtagttgctccgcctggccgcccaccccccagcccctgcaggcagtggggctgttgacacatcccaccatcctgactccggaactacggagatcacagggctttattattaattggtgatgagaagaagtagggatttttttttttttttttttcctgatgagaaaccctgggctcaagggtggatagttgtctcggccagagtcacatgggccttttaaaagctcaagcttgtgtttcttttcactatggattctctttactcagataaggcaggaagcccactgatctacatatttacccagagaaaatgcagagagtggagattggcggctggtcaggtgtggtgccccgccaccagggcctcccatcagctaagccaaattaagaggctttatcctttttttctccctggacggtccataggcctgaaaagctgctgtgatcttcctgtcaagctggtgactgagacttcccatcactcgctgtcatctctgagagcacagatttgttccttcttccttctccttttcattttcttcaagatgtggtcccaaaacacgaataccgccagcccatatccctgtctgccactcacccaagccagtctggagttcctgatctcattctcttcccgtttctgtcatcctgttggtgtccctttcttggtttatttttccaggaagggcaaaagaacaaaaaggggaaacaggacacctgcctagggcattgcttctcttctcctggtggtgtttcagaattgcctgtccccgggaaaagggtgagggacttggtgattgtacttttccttgatcccaggaaagaacttcagtcccttttctggcttctgagaggagagatttttgttgctgctggtaaagatgagatgtggaacccccaggccctatctcaattcagacttacccacctgggaaacttggaggcttccaaacctctgcagataaaacatagtacatgaaatgatgtaaacaaaacttgtgctcatgggactggagagtaaagactggaaaagttatcagtaaaacttgacctgaagctaagtttctagggacgtcatcgtgattgacgtgttcggtactgatggcttagttgatgccaggcactgtgctgaggatgggcatagttgaagtgagtgacagagtcctggggtgggaggctgggcgtgccaagaaattcttataattcaatatccgatgaggcacaatcacctagtggttgagaatgaggtactggagtcggttgtgaatgtacatgatggggatcggatgaggtcatgcatgtcgtgacgggtctcgtgcgtaacacatagtaggatcccagtcagcgagcattagtattctgtccacacagtactgagtacaggcacggcgtggagggagtccctggagggttaaagagtattttgtgagtaaagtcaggggaaatggagagtgtgcctttccctttttgagttcttctgggcttaggaaggagatgaaccagataagcctactgtttgttgagtgcttccttttcatggctagtagagtcctcacaacagccttccagggtaagtactgtattattattagccgcatgttccagaggaagaagcaaaaactgagcacctaagtaaacctgcctgggaccacccagctaagaactggtggcgtcagtcggtctccagtgtagagcgagataacagatgagtggatgggccacaggtcctgggtggtgagggcggcagcagctttttgatcttaaaaatacagtttccttgtcacctgagagctctctgaaagcagtgtgtgagctgactttttggatcaactttacttttcccttctttttaggcaattgaagatgaaggtggtaatcctgacgaaattgaaattacctccgagggaaacaagaaaacatcaaagaggtctagcaaaggtatggaggatttcataagcaagtttcatgttaagtgctttcttcaaaacgaatacattgctaatgtgcctcgtttacttgtctgtgtgttggacttgtgaaccactctgaactgggagccttcagcgaagctttgcattttctttcaagatctctctactgtgttttgttttcttggtatctgggaattccaatggaggatggaaggagtatttgtcctttattcattttcctctgtagattgtcagcggtccttaaataaggagtcttttgggagtcagtcacagtggcgtgtgcctgtaattccaggcgactcggggctgtggtaggaggatcacatgagcctgggagttcaagaccagcctgggcaacatagcaaaacccagctctacaaaaaaacttttaaaggcccggtgtggtggcatgcatctgtggtcccagctgcttgggaggctgaaccggaaggattacttgaccccaggaggttgagatcagcttgggcaacatagggagacccccatccccaccaaaaagaaattagccaggcatgatggcatgcacctgtgatcccagctacttgggagttttaggagggggatcacttgagcccaggagctcaagcctgcaatgacctaatgattgcaccactgcactccagcctgggtgacagagcaagacccagtctctcttaaaaaaaaggggggtgggggcggggcacagtgtctctcacctgtaatcccaacactttgggaacccaaggcaggagaatggtttcagtctaggagtttgagaccagcctgggctgcctctatccactgccaaaaaaaaaaagtacctaggcgtcgaggcacgcctgttttcctagctacttgggaggctaaggcgggaggatcatttgaacccaggagttcagggttgcactgagctatcatggcaccactgaactccaacatggagtccaaaaagtaggactgcctgagcctcctattgcttggacttggagaaaataacatcccttataaacagcacttggcaaaaacagaattgtcactttaacatttcttttaaaagcagcttatacagtaaaagtcacattccacatgacatgactctcaccatcttaccgaaatctctcttgcccatcccccacaccctgtgctttagtcaggccccaaacacgtgatttactctcctggttctctgtgacttcgctccgcccacccttccccatctgtctgccttagagacctagttcctcaaaagacaactgatccatcccaccaatagcaactcgtctccttgggtcctctgtcctcccgtggcatagttccttaccccttggtttaatatttatgtcatcttgccttctgtcaagagcagattgatgaggactagggctgtgtcttgtttatctttctttccccttcaatggtttaacttggtaacactcaactattggcttaagaaagaatcagctgaggcagggcgccgtggctcacacctgtaatgccagcactttgggaggttgaggcggactggtcacctgaggtcaggagttcgagaccagcctggccaacatgatgaaaccccgtctctactaaaaatataaaaattagccaggtgtggtggcgggctcctgtaatcccagctactcaggaggctgaggcaggagaattgcctgaacccaggaggtggaggttgcactgagcccagatcgcaccactgcactccagcctgggcgaccgcaagactccatccccctaaaaaaaagaatcagctgaagctgggcttgtagaccgaatgttctcttggttcatgtagagttttccctatctgaaatgcttgggaccagaagggtttcattttttggattttgtgcggtattttcgtacgcataatgagataatcttgggattggggcccaaatctaaacaagaaatttgtttcttatacacctgaagataatttaataccatattttttataattttgtgcatgaaacaaaactttcactaattccacacatcaggtgtggaattttctacttgtggcaatatgtcagtgctcagaaggtttcagtttcagatagggttgcccaacctgtaattgaaggcctggttctcagggcccaaaactaaatgagataataactaatacttggtggtgaagtactgggtttaaatatctgagagtcaggccccagtgtcagccacagtgtttggggtaagtgctgggagaacagcagaatgaagtcacttctgtggctcatgatacattgcgtgtttttgcctttactcaagtatacttctgccaaggcaaagagtcctggaaaatcaatggagaaagaaataataaaagcaaaaaacagagcctgtggatctccttttttgttttcctttttcttctgataaaagcaaatacttgtactacaggcttttgttgctgtttttgttttgtttttgaggtgggttctcactctgtcactcagatggagggtagtcgcgcagtcatagttcgctgcagccttgaactcctggcctcaagcagtgctttcacctcagccccacaaaacgtttagatttcagttgtgagccactgcgcccggcaggttttaaaatacgtgcatgggagtaaaaagcagaagttgttcacagtcgggacagcccactactaaaagttaggcatacttctccagactgtgtgtgtatgtacaatgtttaaaagtaaacttaggcctgggttacagagcaagaccctgtgtctagaaaaacaaaaagttaaataaaagtcaatgagctgggcatggtggcacacacctgtagtcccagctactagggaggccaaggtaggaggattgcttaagcccaagaggtcaaggctgcggtgagccatgagtgtgcttctacactccagcttgggcacagagtgagagggggaaaaaagtaaatatataggtatgtgcacacacctgtatgcatatttttttcattaaaaaaacccgtgatcttgctatacaaaatctcactgttttttaacaggctaataatcttctgtatgaataaatacacaatttagcccatcagtctttttattactagacgtttggagatttttatttccaattatcactcggtacttccaacattcagtgtttgcacgaaccagagataaatacctttgtgtggtcaaagtaatataatttttgataacttagtgaaaggagaattctagactccaaggatatggccctttattttcacatagctagtttacaaatagctgtcccggccaagttcagtggctcacgcctgtaatcctagcactttgggaggctgaggtgggcggatcaaaagatcagcctggccaacatggcaaaaccccacgtctactaaaaatacagaaatttgccaggtgtggtggtgggcgcctgtaatccaagctactcaggtggctaaggcaagaagatagcttgaacctgggagactgaggttgcattgagccaagatagtgccactgcactccagccttggcgacagagtgaggctgtctcaaaaacaaaaacaaaaacaaaaagctgtcccaggttgtaccctaccaacaatgggtgacggtgcctatttcactaaactcaacatcaaacttaccttgtttgcctgttaccttgttgcctgttatatagaagaaaagtatttcattgtatttatctgcatttttctgcaggtgagattttcgtttgcatttcttcacagattatactcttctgataattggacatttgtgtcgtctgaatggccttttcatgccctttgccgatttctgtgctgggttgtttgtcttattgagttataaagactcatataaaatgtttctattgttttaatctgtcattcaatttaatctgattcgacttgtggtattttgatcactaggcttctagattttatgttacgctttaaaaggacttctttgcttttaaattattaaaaatatgactgtaaggccaggtgcggtggcacacgtccgtaatcccacgatgcaggtggatcacctgaggtcaggagttcaacaccagcctggccaacatggtgaaaccctgtctctactaaaaatacaaaaattatctgggtgtggtggcaagcgcctgtaatcctagctacttgagaggctgaggcaggaaaatcgcttgaacccgggaagcagaggttgcagtgagccgagatcacgccactgcactccagcctgggcgacgagtgaagcttcgtctcaaaaaaaaaaaaaactatatgtataactctgttatatatagaaagaataatatttatggttttatttttacattttacatttggaggtttaattaatttagaatgtattttgcatgtggtgtgaggtaggtagggatgaaaacatgaaacatttaggctgggcgtggtggctcatgcctgtaatcccagcactttgggaggctgaggcgggcagatcacctgaggtcaggagttcgagaccagcctggccaacatggtgaaaccccgtctactaaaaatacaaaaattagctgggcatggtggcggatgcctgtaatcccagctactcgggagactgaggcaggagaatcacttgagcctgggaggcggaggttgcagtgagctgagatcatgctgctgcactccagcctgggcaacagtgcaagactgtgtctcaaaaaaaaagaaaagaaacatttgtcatcagaaagatcacttctgcccctcccagtgcgtctcccctcccagcccctgcaaaaataaaagtcgctgttgtgattacttcaccagatattagttttacccattctagaacttcatgtaaaatggagccatgcaatactagctcttttgtgtctcatttgttgttttgttttgcttcttgtaatcagttttattctagaaatttacagtacattttgatatctgatagggcaggtcggtaagttttcttgaattattttcaactactttatcagtgggttttatcaagattttaactgaaaatagagggactgctgtaatgtgtgaattcaaaatgctttaaaattccagaaagcatatctcatgtaatctcagttctcctcctattgcttggacttggagaaaatgacatcccttttaaacagcacttggccaaaacagaattgtcactttaacattttttttaaaaactgcttatacagcaaaagtcacattccacatgacgtgactctcaccatcttagcagactctcaaaataattatcaggggctgtgcgagatggctctcgtctgtaagcccaacagtttgggacaccgacgcggaaggatgacttgagcccaggagttggagagcagcctgggtgacatagtgagaccccatctctccaaaaaattagaaaaattagtcagatgtgatggcgtgcatctgtagtcccagctactcaggagactgaggtgggaggatcacgtgagtccaggaatttgaggttgcagtgaaccatgattgggctgtgattgctctccaacctggtaacagggcaagactctgtctcgaaaaaataaaataattaccaggaaactaaatttatttgtagtgtcatcacaaagtacaaattaataggatgttttatggtgtttgagaatgttttgtaactggagatgcaaagttggcctgtttgcttggttaagtattacccaatcctttgctgctggcttgttttgttcagtttttgttcattttggcaatttcatacttaagttgcaagaataatgcaaggaattcccatataccctttacccagagtccccaaatattgccatctgactacatttgccttgtccttttctctccttgtatgtatgtttttactagaccgcatggtaagttgcaaggcgcatatgcccctttgccctacgtactgcagtaaagtaaggatattacctaactgtagatgtccagatcaggaaattaacattgatacaatactgccacctcgtcttagtcctcatttagattcagtagtttgttccaataatattctctataactcagacaaaaaatgtccagagtcatgcattgcatcaggttgtcatgtttccttagttttctttaatcttgaacacttacacttattttgtagtttatttttctatttgaattgttttgggttctccccgccccataataaggatcaagttatacgcttgtcagaaatacaccagacatgttgtattcctgttttttgttttgttttggtttgaaaccgggtcttgccctgttacccaggccagagtgcaatggtgcaattgtaggtcactgcaaccctgaattgctgtgctcaagcgatcctcccaccttggcctcccaaagagttgggattacagacatgagccaccacgcccagcctatattgtcatcagagtatactatccagaggcacatgctgtcagtttgagccattattggccatgttagctgacttcaaatgctattggccaggtttctccactggaaagttactgtcttccttttcacagttacatttgtggggaagatactctgagactttgtaaatatcctgctcatcgtccattagttttagcaaccaccagttcctgtctattcatttattctggtagttgccaaatggtgattttttaattttgttattgtttgtttattacttggtttactgacataaggaatagcttgccctttgccctcatttatctgtgtgaacttagattattttattccataggttgaaagcctttatgcttatttactacaatgtgcaaaacgttccattgggaaccctgtcagacaggctcccctgtcatttccacatgttcatgccattcttgggatacttttttaccttctggaatggcagggtacgtgagtctcatcttatgcttttcctgccctttccccggaatcagccatttcttccaggtgc[145 bp omitted]aaccccatctctactaaaaatacaaaaaattaggcaggcgtggtggcgggcgcctgtagtcccagctactcgggaggctgagg[139 bp omitted]tgtacttctgtaactaggatgtcaactcctgggccagtacttggtttgtgagagctactgggctgattgtacctcaggaaattaagtactgttaaagcaatccgaagcaagccaaagacagcttaagaaaggtgacaaagccctcatgaacagtttggcaaacttgctagctggttaaaattgttaatcacttctccaggattttttaggtgacagttatatcattagtgaatcaaagaattaagcatgttgccagattgacattgaaatgtacataacattcttaaatagtaaatagaattaacaggaaattttcaagtcctgcgaaatcactaattagagaaaaatttcctagatgtgatgactttttagcagagaaaattttcctagatatgatgactttttatcagaaaattgtcacttttctccacagtaacctaaaaggaaattttataatgtgttccataatagtctaaaaagaaaatgcacaagaataactaaaattctgggcgggggggaatacagggatttcctctaattttgatgataggatattgcaaacaacagaaagtttgagggtttgttcatttgatggtgggggaaagctctaatcttatctcttcttgtgtaaaatagaaattccagctagtttaatactttttataatatagtaataagaaagacctgaagtaagaataaaactgagaaacaacaaagaaagagaaatttggctacataaaagttttaactctctgttaagaaaggtatgcaacagtctgggagaaaatattatagcacagaataaggaagaaactcatatccagaaagcattgaatgttctgacaaatcagtaaggaaaacaggcaacccagtcaacaaggagcagagactatgaacaggcaatttacaaataaatgaaaaagcagatgtggcctagagaccaaaagattcccttgctggtagttgcagaatagcaaattttgaaatgacataagatttttgcctatcaaactggtaaaaatttacacagttccgcaaggtgcggtgactcaaacctgtaatcctagcactttgggaggctgaggtgggcgggtcactctaggtaaagagtttgagaccagcctggccaacatggagaaaccttgtctctacaaaaaaatacaaaattaaccgggtgtggtggcacgtgccggtaatcccagctactcgggaggctgaggcaggagaatcacttgaacccaggaggcggaggttccggtgagccgagatcacgccattgcactccagcctgggcaacaagagcgaaactccatctcaaaaaaaaattttttttacacagttcctgttctcctacattggcaagggtattggggaaggtgtaggtgttggagacaataaattgctacagcctttttgagaaggcagctaacgtggggaactgccgtagcatggagtcaaagatggaggtggatcaatacgcagtacataaaaatgtccaaggcctgttagtagtttctgtaacttgtgtcattgctcactaacaataagatttcatctcatcacaagcttatttccatatgtatcatataatgtatgtagatgcaagatgatgtcctgaggcaccaccaagctgggaacgttggtaacctcttaagaggacagtagggaaaagggaaggtattatagctttatacttcctatacttaggaggatgaatcttctgttactgcagtaaagtttaatacgtatatttgcataattagggaagtgtgtttgtgtaatcaaatcagaaagtaatgaaccacccacatgcagccctgggtactatgggagcatcccagcagaagtccagggcagcagagtcagcagtgagattggacagtctctgaggcagaagcttaacagaaggcaagagatggaatcccaggcagggagctacgagcaggcgatagaggcgatgacggtcatgcccatagctgagaccacaaactagggtgaagagctgaggtagaaggattcaaggggcacattggccttgatactaaagacaaatcaatggctcttcagtttttgccagagagttatacttttcccatttgcattcatttttggtttttttagacgtttttcttctctggagaatactgtctttcctcaagtcgtgatgattaataaacattccagtcagggatgtgctttatacgttgaagattaaacattttgaagattgcatgttctctcgacatttccagtcacattttacctcgggggagctttcccctgagaaggatttggctgcagtgtacctgtacatactgcttgggagaaaagtggtcatagaagtggaaaaccctgattctgtttgatgaaaatctagtacccctcctgaggaagagagaacaccgtatggagggcagcaagtttctgataagttagtagatttttcctattatctggaataggattggacagaaaccaacgtacgtatcatagaattgtagcaactttatcaaatgtaatcattctgtggcaatgctctggtatctcttcccagcatgtttacagagaccactgggttgagttccagctgttttttagacctcgaggcatgttttgccaaagaaataatggtataaaatggggatggatttcccagccaactgaccaaaatatcatgtattgaattctgttatcagtttgatagtcccctatctttgtaaataaggtaattctaaaaatatgaatgaaattagaatatttaaacgtcaattacagtacaaataattaggtttggaatttttgtctttggcttttctttttttctccccccaggatgttacatatttatccagttacaagaatagtttccagtatagacaaattaattgtcttttcttttttctttgagacagggtctgactctgtcacccaggctgagtgcagtggcacaatctcagctcaccgcaacctccacctcctgggttcaagtgattttcctgtctcagcctcccgagtagctgggattacaggtgcctgacaccacacctggctaatttttatatttttagtagagacagggtctcaccgtgttgaccaggctggtctcaaactcctgacctcaagtgatccacccacctcggcctcccaaagtgctgggattataggtgtgagccacagtgtcagaccttgtttccttaatactgcttgaaacaacacttagccttaaaaca[192 bp omitted]gaggcaggagaatggcgtgaacccgggaggtggagcttgcagtgagccaagatcgtgccactgctctccagcctgggctacagagccagactccatctcaaaaaaaaaaaaaaaaaattgattttcaggctggatgtggtgactcgtgcctgtaatcccagcactttgagaggcccaagcaggagactcacttgagagcctaggagttcaagaccagcctgggcaacatagtgagaccccactgctacataaaatacaaaaattagccaagcatggtggcacgtgcctgtagttccagctactcgggagactgaggtgggaggatcccttgaggatcccttgatgctgggaggcagaggctgcagtgagccaagacatgccactgcactccagccttggtgacggggtcagaccctgtctccaaaaaaaaatagactattcttcacactgggaaagaggcctggcaggaagtagttttcccaaagttgtgtgtttgatcagcttttctcccatgttcttcaaaaagctgagcaccgccttctataaggaatgctaggaagctgtgctggcagtagctctaaaacatgaaatgatgctacattatgccttgcctttgagatgtggtcttccagagtctatttcatggatttcatgcatgtgattttattcttcacatggaagacagtcaaagagtttaatttgagcatgcctattcctgacaccagaaatttcatttttgccatgcctaatgacttccatttttgcttcagttctgttatttctggtatcatcgtttacatttttctattctctactcattttatcatttgtatgaaaaagcaaatgactatataaatactgctgtttggatgaaggtgccagcatgcctgcccttgtgaactgttgcaaatgttataaatcatcaattagtaagaaaaattgggaggttgcacaaggggagttggggaaatgacttccctgttcttagcattgttggctgacaggagaagtatgaacctaagaaggtatgcagcctcttgatgtttttcacattttttaaaattactaaactctttttattttatttattttgagatggagtctgtctctgtcacccacaccagagtgcagtggctcaatctcatctcactgcaacctctgcctcctgggttcaagcgattctcctgcgtcaacccccccaccgagtagctgggattacaggcacctgccaccatgtccttctaatttttgtatttttagtagagctggggtttcaccatgttggccaggctggtctcaaactcctgacctcaggtgacccacccacctcgacctcccaaagtgctgagattacaggtgtgagccaccacgcccagcctaaaattactaaactcttgaagaaaaacctggagttaagccataccttccaatcgttttttagtttctttttttttatacttaatcttagtcttttttttttttttttttttttaaagacagtctgtcttgctctgtcacccaggctggagtgcagtagtgtgttctcgcctcattgcaatttccacttcccgggttcaagcgattctcctgcctcatcctccccaagctgggattacaggcgcctgccaccacgcctggctaatttttttgtatttttagtagagacgcggttttgccatgttggccaggctgttctcaaactcttctcttgacctcagatgatccacccgccttggcctcccaaagtggtgggattataggcatgagccaccacgcctggcaagtattttctatttagaaaaacatggtaatgccacatatctaaaactggaacaaaaataacagatcagtggaagagaatggaaacaagtaatcccagacataaatacaaatataatattgcggaagccaacatttcaaattggtcgggggcaagtactatttagtcagtggtgctgggaaatcagtttccaaatgggacaactattgggaaaatagtctcactcaacatgaaactgagagaataaatgtttaaaacttcaaaagaactaaatacaggtgtatattatttagccttcagtatggaggaggacatccaagcatgaaggtataaaccacttacattttaaaaacaattaatagcttggccacataagagtgaaatgggccagggcgcggtggctcatgtctgtaatcccagcactttgggaggctgaggcaggtggatcacctgaggtcaggagtttgagaccagcctggccaacatggtgaaaccccatctctactaaaaatacaaaaattaactgggtgtagtggcaggcgcctgtaatcccagctactcaggcggctgaggcaggagaatcacttgaacccaggaggcagaggttgcagtgagctgagatcaggccactgcactccagcctgggtgacagagcaagactccgtcccaaaaaaaaaaaaaaagaacagtgaagtgtactcaaaacctgtaaacaaaatttaaaaactggtaaagaactgggaaaatatgttttgtacatatgatatataaacttcaaatgatgggggatggagccgaagtgttttgtttgtttgttttgttttgtttttgagatggagttttgcttttgttgcccaggctggagtgcaacggcaggatctcggctcaccgcaacctccaccccctgggttcaagcgattctcctgcctcagcctcccaagtagctgggattacagtcatgccccaccacacctggctaattttgttttttgtttttttggttttttttagtagagacagggtttctccatgtcagtca[131 bp omitted]ttagaaaagtacaggtgatcaacaacaaaaagcaaatgattcaaagcaatttgagtagtcaggagataaattcgtgttaaaacagtattccttttcttacctagcatattggcaaagataaagaaaaatagcaaatttttaacagagattcaagaaagattggctttttttttttttttttttttttctggagatggagtctcgctctgttgccagactggagtgcagtggtgtgatctcggctaactgcaacctctgcctcccggattcaagcgattctcctgcctcagcctcccgagtggctgggactacaagtgcacgagattggcactttttaattcgctgttgatggaaatgtataagttaaaaaaaaaccttcctctgcaatttttgttttgttttgttttgtttttgagacagagtcttgctctgtcatccaggctggagtgcagcggcacgatctcagctcactgcaacctaaacctccagagttcaagcgattttcctgcctccgcctcctgagtagctgagattactggcaaccgccaccacaaccagctagttttttgtatttttagttgagacagggtttcgtcaggttggccaggctggtgtcaaactcctgacctcaagtgatccacctgtctcggcctcctaatgtgctggacttaacaggcatgagccaccgtgcccagcccctctggagtatcttgatagtatgtgggttttttgtttttcttttttttttttttttaaccgagtttcgctcttgttgcccaggctggagtgcagtggcgcagtctcggctcagtgcaacctccgcctcctgggttcaagtgattgtcctgtatttttagtagagacggggtttcaccatgttttccaggctggtctcgaactcctgacctcaggtgatccgcccgcctaggcctcccaaagtgctgggattacaggcgtaagccatcgcatccggcccttcttttttctttttaagcattaaaaatgtgcatactcgggcatgcgcagtttctgtgggaaaacatgttccttaactaaaaggcagcacatttgcaacaaataatttttccctcaaacaaggacacttgggataggaagaagggcagagctgaggacaggtctgatcctgttcaactttactaagaacctgttttctgcacttctacttccacagctcagacaagaacagaacctcttctgcttgggggtggggcagggctgtcttgtgcggaatggcctcattcctggattaggaagtgttcctaagtagtgaggtgtctcagatgtttataaagtgaccacttgtgtagtgctcagggcattgttgcttctgtaaagtgcgtatcatttgatctcatgctgtaaatgattctgtcttcagggcgcaaaccagaagaagagggtgtggaagataacgggctggaggaaaactctggggatggacaggtatgtgcagccttgcgagtgagtagcgtggtggatggaccagtggcggtcacatgatggttcggtctggttgtgtcacaggaggatgttgagaccagtctggagaacttgcaggacatcgacatcatggatatcagtgtgttggatgaagcagaaattgataatggaagcgttgcagattgtgtcgaagacgatgatgctgataacctccaggagtccctgtcggatagtagagagctagtcgagggggaaatgaaagagcttccggagcagcttcaggaacatgctgtaggtaaccggcaatgtctctagaatgtgccctgaatgtatcagttccacaattaaaataggtgatcagtttcatattgggaagtaagttgttctgtaatgccagttcagtagaataagggtcagttggttcagatgattctgaaccaatttgttttgttgaaaggtgatgtcttataacatttcatatgtacttgctatccatttgcggcatacagtatgagacattttgaggacaaccattcagactcttcctgttgccggacttgatctgtggtgttatggcctaggtaccttgaaagcattgaactaggaagaggttagaagttggtgttttcctgttaagaagcaattgttgagctgggtgccttgatgcactcatgtaatccggtaactcagaaagctgaggtggaaggagcagcccaggagttcaaggctgtactaagctatgattgtgcaattgaagtccagcctgggtggcagagtctgacagaaccctatctcttgtttaaaacaaacaaacaaaaaaaaaaacacagccagttgatacctatcttaagagttaacctcaagtattaacctggatgttgtttttaaacctaaatttttttcctgttagaaacatatcaaatggatagtaagattatagtgggtagtatttcctgaatactacctaccaggcattggcattatgcccttcctttcttttttttttttttttttttttttttctgagacagagttttgctgttgttgcccaggctggagtgcagtggcgcgatctcagctcactgcaacctctgccccctgggttcaagtgatctcctccctcagcctcccaagtgagtagctgggattataggcgcccaccaccaagcccgactaattttcttgtatctttagtagagacggttttcaccatgttggccaggctggttttgaactcttgacctcaggtgatccgcctgcctcagactcccaaagtgctgagattacaggtgtgagccaccgcgcccagcatgtgccctttaattcttctaatagcaacatgaggtgctgttgtccccattttcagttgaggaaattgggaaggcaagaactaaaaaacatctccagatgacacacagctcataacagaataagaactaagatcaggctaattccagaggccatgtacttaacttatgtacgatgttgtcttggtgccattaatttgatattaatttcatttacctgatgattaatgtttgtcagacagaaaaagtgatgcatatgagaagctgtggggccctttctgtgttggctcgtggggggccctgttcttgtcctggtccttaggtcttccgcagtgagtgcttctcaagcagtcttggtggacagaaaccttgttgtatgccagtcaatccgcttctgcatttcttcagaatatttttgcatttcctcttggaactgattccaagtatccttagaggtagcagattgtcatatttgaatggaggatttgagtctgagaagtggctgagagttattctgatacaaatagggtgtgcaatttttggtgagtcccattcatcagcttctaaaaaggagtagcagaaacacttgcacagcagcaggagttacttacccttcctgaatggctgcatcttcttaaggctgtttttttccctcctaagcagaaaatcatacattctgcaacaaaagctggaaacatcctaaatgcctggaagcagtttagttttaagggttgaggccaggtgcggtggcttggctgggcacagtggctcacacctgtaatcccagctactcaggaggctgaggcaggagaatcacttggaccagggaggtggaggttgcagtgagccaggattgtgccactgcactccagcctgggcggcagagtgagactctcaaaaaaaaaaaaaaagagttcagaggtagattctggagatggatcaatttctgtgtgtccctggacaaactccttaacctctgctcctcacttgcaagaggttttcggaagattcaatggatggatgtttattatacacttaaagcagaagtcatcaagttggctgtcacctgggttgtttttgttttgttttgtttttgttttggggtttttttgtttttgctttgttttgctttttttcaagacagggtctcatggtgtaaatgaagttttctgagagcacaaccacacctattgatactgttgtctatggctgcttttgtgctttagtgtcagagaggagtcctgactcatctgttctacaattcctgaagaatttactaggcagctccaacaaagtgtttcccagcctagttcaatgcctagcatctagaaagcaccgtagagttatgaaatgtaccaccacgaatacagtttttactgcagtgtaaccatcaaaatgaattaagcacatctgtgtgaactcaaacaatctccaaaagagaagtgacacttggggagggttcagaatgatgtgctgcccctggtgcagatgtctaaggggagatggtctttggcacttaaacacgtgtgtagcatatgcgatgaccactgcatggcaggaagaaaggagtagtggagagtggttttcagtgaatgggcttttgtaccttttgagtcttctgatcgtgtgcgtgtctttcctagtgaaatatagtgataaaaatacatgctggttataaaatatctgaaaacgtctccccctaagtatatctcaaatttcagggctttagagcagatggccaaaattggtttcagtcacaaattatctgaaccccctttctttgtttggggaatcctttgccttattgggcagagcctacttcttagaataaaagctattcttcccctgcaagtagggcataggatattgccagtctcgagctcctgtcctcaccctcatgctgggagatgctgttccattgagggaggtacctaccccaggggcagcaggtcccacatcctcagcatccaggctgggcgagcagcggtggctgaaggctccacttcagcaggactctagccattgctcctggaagaacagccctcaccctgtgctcagatccacttagaggctgtgcactcattttcatctcttttctgtttgacttagactttttttctttcttttgcatcttaaaacctacatagctaccatattagtagatttcctagtctatgtgcaggtggacatttacatacaacttttttttcagtttagctgcaattatactataatagtgttttgatttctgccctgggtttaaaattttgttgtgaattattttcatagctgttcacttttcattgtacagatgtaccattatgttacgttattgttggtgtgatgaactgtattttctccatttattttacagatagaggacaaagaaactataaacaatttagatacttcatcatctgacttcactatattacaggtaaactgttgtatgtctcagtacttttagaatgaaaggtcagaccacaatttctggaatccatttcagacaccatatgccagttccagctaataatcaccacaagggttgtttcctttgtcaggatcgttaatgggtgtttgctttctgctttcctccaaatataatgtacgcattgccagggacttaactctaggcttcgacgagtggcctccaagcgctgtggcttaccagcagtcattagagtcatgttttgtggcattcttaatttcattgcttgtggcaggggaaggcagcctgtctcatctaccctgggtggcatcccctgcagaaagatgatttgatgagacagcaagagggcatggctacctgggaaagatgagtagggcccagatggggattgagggttgacagagccctgttggggaaggtggggtctcaggggttctggtcttgtctttgggaagttttttttgttttgttttgttttgtttttgttttgttttttctgaaattgcccagatttcatttaatgactgtatcatcctacctgtttcattggcatctctgtaaatattaaatcttagatgagaacagatgagttgagaatttccaggtatgatttttatatttgtgggtcttgagtttcctttttttttccagcctacatagatacaaattgttagaacacacttacctaggtagctggctaattcttaggagaactttttgtggagaaatgaagatcgagccagcttttgcccagcctttttatttatttattttttttcccgtcttctttttaaatgtcatctatgttattgtaattagaaatccccttttggaaaagatctccatttgcttctgccatgcaagggcaagggagatactggaaagccagagctccaaccttgaggagggcacaaatctcaagaaaacgtggtgaaacccagttcgcttttagagctgccgtctctccacctgcaaattgacacggccattcccgactcagaaaggagaggaggagccggatcttgtcactttcccctggctctttcttggtcacagtctcccatgttaaaatgggaaacctacagtctctcctaaacaaataggaatgtatttgcttctctttagagaaaatgaggaagaattattctgccaacattgatgatttgcttcagtcctatggtcagaattcccagcatggggtagggtacatggggaaaaaactgattaaaaataagtgaaagcatgaggaaagtgtacagtttcatagagcatcctggaatggcagggcagttcccaggggaagttataattcagtcacacctacttattgggtatatgtgaatcccctgtgatgtgtcaggtgtggcattaactaccagcattacatagatgaatgagaaggaagggtggtccccatgctcgtggggcctggcctgatggttaacagtgcagactcacactcatacacggcctttgctcagagcctgtctctgcttcccacctgctgtgtgtccttgggcaagttactcagtctgtctggtcacagtctgttactctgtaaaaagaagggtgctaccattaggaccaacctcctgcaaccgatgacgagtctgtgtgtatgtaaggtgcttacatttgtgcctggaacctagtcagtgcccatcagttgactggaattccagaggagtgtaccttgtgtgcacaggaaacataaaggctgggggatcacatcatgtggaaaaagctcctttgcttagtggggcacagctggagttgggttagagggaaatagggaaagccttcctgaaaggagatgccactgagctggatactgagggatgtggatgacttggctggacggggcaggggagggctgggcctgtcagggagggaggtggcatagggatccattggctgaaggctgaaggccacagagggacatgagcttactgtggacacaaggtgcagagagatgggatggggataatacaaccagatgccacagtaggcaaggatggcaccagcctgagtggacagggcttcctgggaagagtctgaatgacttctagaactggcctggtgggaacactgattggaagaggagatgaaggagggagggtatttacaaagtttttcatgctggcaccaccatgccaagtaagagcaggagtcataccacctgggcccatattccctcagtctttcgaatatcagaaagttgtcgtagcttcattgagtgaaaaagtgactgttaatgtgccatgcattcctctagatgctaacagtagaaaaatgaaaacactgctctccttgaatttgagagttcaatctagagggtcaggcgtgcttatgatgagtgcctcaccatgaagtgagaccagttccaggctcctgcaggggagactgaatggagggtgggctgagtgaagtggatgccagtcttatggagccattcctagaacaagcaggttctccacctcttgagtttgtgagtttccctccctggatttttaaaattccctctttagttattctgggttttcatttaaataaactgtaggtgtcattcatctggcacagtcttatttacgttttttcttgcaggaaattgaagagccatccctggagccaggtactgttaaatgaaaaacttaccagcgggggtttggaaccattctagttttccaccttctctaatttgaattctttgatttttaaaagttaccttactatagtatacattgttctaaaggtttacaatccaaaacctaccaggatcatagagattggaaacccagccatatcaccagatctgtgaaagtggctcacttctcattttacaaaatgtattggtgagatgaaagtatctcatgcctttttgaatatcaacagcattgaatcatacatagagaaagagttccagatgcctctcttgagagctaatacctctgcacccacaaaacagatcttgtgatattgggcagtagcttaattttgttgtttttaattgaggcagctcaggtagtggtagggagatacattttaaaacataaatttgagacataactggattccagaagaggaaagagtgtcttcatgagaattccaaacactgttcactttctggactgcaaatatctcagagcacggatggaagagattctggttttcatgttggactgttctgttaaaagaaattcaaagaaatttggaaattgagctgttcagtgaatggtgatacattcagttaagcaacttggactttggaagctaaatttggaagagtcatatctaaacgacgacagaatgaagactgtcaagaatcagccagaaggttttgggggttaaatctctgggatgcttttctcttccgtgtagcgtagaggcttacctagaggcggtcgcggcgcaggtagtgtaaccagtataactttgtgtacccgcgggttttccaatctctgtgtagctagcagttctcttcgtgttagtgtggcagccgtgccagttccacatttgtgattgctttatttccctggtaattaaaccttgtgccattctattcctgttaaatccgtagaaaatgagaaaatactcgacattttgggggaaacttgtaaatctgagccagtaaaagaagaaagttccgagctggagcagccatttgcacaggacacaagtagcgtggggccagacagaaagcttgcggaggaagaggacctatttgacagcgcccatccggaagagggtgatttagatttggccagcgagtcaacagcacacgctcagtcgagcaaggcagacagcctgttagcggtagtgaaaagggagcccgcggagcagccaggcgatggcgagaggacggactgtgagcctgtagggctagagccggcagttgagcagagtagtgcggcctccgagctcgcggaggcctctagcgaggagctcgcagaagcacccacggaagccccaagcccagaagccagagatagcaaagaagacgggaggaagtttgattttgacgcttgtaatgaagtccctccggctcctaaagagtcctcaaccagtgagggcgctgatcagaaaatgaggtttgttttttctcagttttagaccagacgctatctccttttcattggtcatgtaatgacacacataagctgtttttttctgcaattggccagccagactgacgaaattgtagttttgcttctaaagaatgtttcgtttctctttgtgtgtttttaatgggtgattcaattccttttctttttctcaacctaccatggttgtgttcttaaattcttcctaattacctttagcccagcagaattaattaactcctgtgggtctgaaatcttatggttaggtcagattttcaatacaagtttgtcggggtatcattttttcagaactaaatttcgggtaggtatgcaacctcagcacgaattttatggttttgagtttgtttcctccatgctgcttccttgtggagtgacattgtcttttgtctctagttctcccgaagatgactcggatacaaaaaggctttccaaagaggaaaagggtaggtcacctcggcgacaccagtcccttggagcatgtatggcctgggcagtggcgggtatttgattctggttcatcgcgtgctatgctccttacccaggagactcctgagacgtttgtgcagtctttctccttctctgctgttaccgctacaggttctgggttgtaggaagcataccaggtcctaagagttaacaggctgatttggtgcagatccttgtgttgggagcacattcatcctgtaacccttcattaaatgcattaactgagaaataattttaccctaccaaattccttcttaatcagtgttctaaaggagtaaaaacatgggatagatacagagctatacgtggaaagagaaacagtgcattgttgacaccaaggttgactgttctgctacatggccgttgcacactgcacttcctcctgtaattaagcgatcgctaactttttttgagacagagtcttgttctgttgcccaggctggagtgcagtggcgcgatctcagctcactgcaacctctgactcccgggttctagagattctcctgcctcagcctcctgagtagctgggattataagcgcccgccaccacacccagctgattttttgtatttttagtagacatggggtttcacca[137 bp omitted]atagccccactcagtattgtgacgggccctgtggtagtgctgctgggcctggtgttgcactggaggctcttggtgaggatagtggtcaggcccacagccccatttggcttttagtgctgccactgcctcaggaaaaatgggaaccatgtctcttttggaaaggttgtctctaagactcaagatcttgtgggtatttgggtttttactagaattttcttttgaaataggtcgcagcagttgtggtagaaatttctgggttagtggactctcttctacaaccagagctacagatttgaagaatcttttcagcaaatatgggaaggtaagtgccagagcttttctggagaagatactttgaaaccagcgttgtgtggcctttacatggaggtcctctcccctcagtgagttctttgagagataccaaggagcttacacttgctaatggctggggagggtctgcccgtccacaggtagaggtgagagtggtgtggaagcttccagagcccacatcaccactgtatttccctcccttctctgcgagcttgcccccttccctgtgatggctcgtggatccatttctgtgtcctcaggacgtcgcactcaggctgggctgccagggttggctggtggggtgctggtcagcatgtctgggagacagcagtgttcttagaacagtgttcgtgatgctggaactcagaactcagaacagggaccctggagtctgatgataggggtcctcaccacgggtgtcttgggtccattgactgaacctcacctcagcagctgggggctctcaaagttgctgcctcagttcaccactgggggcagttctagtggcctcttgtctgcagcacctgcctttcctgagcccgtgaaggtggggctggtggcaccagccccctacctgcagtgcccagcgcagccgcctggccctcctccctgtgctttctcactcccttcctccctggtgtttcccagacttgcctcccaaacagcctcctgcattcagggctcctcgtctctctcagagtcggtttcggggactaccaaaggaaggagtccaatcctttgtgttacacagtgagggttcaacacattgcaatatagaaaaccaagtgttttccctgatactgacttcgaagaacttaaaagaggataaaacaggctgggtgtggtggctcacgcctgtaattccagcactttgggaggccgaggtgggtggatcacgaggtcaggagtttgagaccagcttggccagtatggtgaagcctgtctctgctaaaagtacagaaattagccgggcgtggtggcgcatgcctgtaatcccaggtacttgggacgctaaggcaggataacaacttgaacccaggaggtggaggttgcagtgacccgagaccgtgccactgcactccagcctgggacagagcaagactccatcttaaaaaaagaaaaaaaaaaaggataaaactaattatgtcattattacggacataactaagggcttcttgagcctcagtgatacaaggtgtgtggctggcaacacctgcgccaagtctcccctactagaccccctttcctgactccatggcgtcccccagcgggtgggtgtgctcagtggggaagtgttgccctggagactgtagtgtcttgagcgcagcaggcctgatgtgggttaattagaggaccgggcctctctgagaatgtcctctgggactaggattccatgtggcatgatgagcatgattaccagcctcggccactggctgctgcagggcttttcctgagccatggtgtcttctgccgtcaaagggcgaccctaactgcatcctgctggagtcgagaaaaccaggtagactggaaaggatgtgtctacagtaactgaaacacatcactgcgttttgttacagtcaatgatagggcagatctgagttccagagcacggctcacagacctttccttgcatcagtctgtgccgaagtcttttttttttcttttttctttttttgcccacattacatcacttcataatttaccacctacgtagcatgactgtatatttggaatcatttcttcacaagttttagaccatattaaaggaacactggcagaaccctgtttgatttccctttcgtctgttcccctacattgccctcctggcccccttgaggaactagatgagcgattagaactggccagaggtccttggaggaacaacagcgaaacagaagcattagtagcattgtcctccccagtctaacacttgtcggacccctgatgagcagacttccctgtggggtgttcatatccccatgccccgctcagtgggcttcatgtctgagtcatatttgcctgctttcctttgaggtggtgggcgccaaggttgtgacaaatgcccggagtcctggagctcgctgttacggttttgtcacgatgtccacagcagaagaggccacaaaatgcattaaccacctgcacaagacggagctccacggaaagatgatctccgtggagaaagtgagtggccgttttcttcccaggatatagcccacattaggaaatgggggtaatacttgattctctttttcaggccaaaaatgaacctgtgggaaagaaaacctctgacaaaagagacagtgacgggaaaaaggagaagtcgagcaacagtgacaggtacccctccttcctggctaaattaaaggggcagggtgttttttgttgttgttgttttgtttttgagatggagtcgcgctctgtcgcccagactggagtgcagtggtgtgatctcggctcacctcaactccacctcctgggttcaagcaattctcctgcctcagcctcctgagtatctgggactaaggtgtgcaccaccacacccggctaatttttgtattttcagtagagatggggtttcaccatattggccaggctggtcttgaactcctgaccttgtgatccgcctgcctcggcctcccaaagtgctcggattacaggcgtgagccaccatgcctggccggggcagggtgttttaaacagaatctcactctgttgcccaggctggtgtgcagtggcaagatctcttttcattgaacctccacctccctggctcaaccaattctcatgcctcagcctcccgatttgcttggattatagccatgcccatttgtggttttagtagagatggggtttcaccatgttggccaggctggtctcgaactcccggtctcatgtgatccgcccgcctcatccccccaaagtgctgggaatacaggcatgagccaccacgcccagccaacatgtctgttttttatagatctacaaaccttaagagggatgataaatgtgacagaaaagatgatgctaagaagggtgacgacggaagtggagaaaagagtaaggaccaagatgatcagaaacctggcccctcagagcgatctcgagccacaaagtcaggtgggcagctcatgagcccaggagattctgtcttgtttctgtgcctagtggagtttgttagtttgctgtgattagctggcaacggaaactggattcatgttgcagagggtttttctcatctgggtattcttggttttccacttacactttccccgtcttttctgtaggaagtcgagggaccgaacggactgtagtaatggataaatccaaaggggtgcctgtgattagtgtaaaaacgtccgggtccaaagagagagtgagtattaattttctaactagggtattttgctcttcttttcagtttgtatttctgtgtgcgtcttagggaattactaagcttcatttgaaaaaagcttttgtcggccgtttcgaaaatgtagaaatctcaaactattttttttgagacaggttctcactctgttgcccagactagagtgcagtggtgcgatcttggctcactccaacctccgcctcccaggctcaagcgattctcctgcctcagcctcccgagtagctgggattacaggcgcacaccattatctttttagtagaaacaaggtttcaccatgttggccaggctggcctcgaactcctcacctcaggtgatccgcccgcctcggcctcccaaaagtgctgggattacaggcatgagccactgcgcccagcctcaaattattttaagaaatgcagaaagctttcctttatccttacttttgctctgataactgttaacttattttctaaagctaactttaaaatttacatatgggactgttggcttttccctgagtcggtgtgtggcagtccacgttccctgtctaccctgaaagtgtcagcacctccccgtgatgcattcctacacccagcagtgtggagcatgccatggtgacctggcccatctcgccagcctccctctagcctgctctccaccttgaccccttcctgtactcttatcttcttgctgggctgcagtgtgagctgagcatggtggctcatgcctgtaatcccagcagtttggtatgctgagctgggaggatacttgagcccaggagatggataccaccttgggcaacatagtaagaccccatcttcacaagaaatttaaaaattaggcaggctcggtggtatgcatctgtggtcccagctactcaaaaggctgaggtgggagaatgccacttaaacctgggaggtcaagactgtagtgagccacgttcattgcactgcactctagcctgggagagagagtgagaccccatctcaaaaaaaaaaaaaaaaaaaaacacacacctattatttgcatggtctgtgcacaccgagccacccttactggttaactgtcaactggggacactctgagagccaacttcccagttgccagccaaggaccaatcttggcagcagcccctccttaaggaaggagagggaccttggacccgcctggtcaaccctcagctgcacggaggaggaaccatttcacttggtgaatggagcggattgcttaggagctttcagtctctgtgtgccagtattataatatgtcatagccttttacccttgttctataaaacacctttggaaaacggaaaaaggaaagtgtgggttctagggataaaatgagaaggtctcttaacaatgtcattggcacaaataaggtacttgtcaagtgtaccggaagtgcttcatttgggaactcattgtgtgtttaattattgaaggaaaaaggaaaattaagaaatttatttttgaagcaaaagacataaaaaattggtgttttgatcttatatgaagttttcgggggcaatactcatttccattttttctctattaaatgtactgttagatcatattttagcattaaatgttgatgaaattctgtgtctttcaattatgataagcaaaatgtaaggcttgtttggattaaacagctcatctgtttttcactaaaagttattcatcacataggacctccacatctgatggttaggcatggatatatatacctgattcttcctgttcccctatcacacctacttttaacttttttcatttttttattttattatttattttttatttgttattattattttttagacagtctgactctgtggcccaggctggaatacagtggcacaatctcagctcactgcaacctccacctcccgggggtttttaagtgattctcctgcctcaccctcttgagtagctgggattacaggcacctgccactatgcccggctaatttttgtacttctagtagagacaggatttctccatgttggtcaggctggtctcaaactcctgacttcaagtgatccacccgtcccggcctcccaaagtggtaggattataggcgtgagccactgcgccagcaatttttttttttttttttttttgtcagagtatcgctctgtcgcccacactggagtgtagtggcgcgtcctcggttcactgcaactactgcctcccaggttcaagggatcctcccacctcatcctccaaagtaactgagattacaagcatgcgccaccatgcccagctaatttttattttttatttatttatttatttttatttatttattttttg[233 bp omitted]agcctcccaaagtgttgggattacaggtgtgagccactgcgcccggcaatttttatatttttagtagagtcaaggtttcaccatgttggccaggctggtctcaaattcccaatctcaagtgatccacccgccctgaactttgaaagtgcttggattacaggcataagcctccgtgcctggcctctgctttaactttttaatgttctttggtgaactaggcttccaaaagccaggatcgcaaatcagccagcagagagaagcggtccgtcgtgtcctttgataaggtcaaggagcctcggaagtcaagagactcagagtcccataggtgagtagggatccaggaacggtttggtgtttttcctagaatgtggtcatgactgtcttctggaaggatgtttgcagagttccctggggtgggatagagctgtgaacctttttgctccttcagctttcagttcatagacttgttatgttttaactttcatcctacggctcttttcttttcttttcttttttctttttggagacagagtcttgctgtgtcgcgcccaggctggagagtgcagtggcgtgacctcggctcactgcaacctccgcctccaagcaattctccagcctc[134 bp omitted]tggcctcccaaagtgccaggattacagacgtgagccactgcacccggcctacttacagctcttttcaaataagtctcttcccaaagattgtagaaggtaacaaaggcagggagatggaatgccttccagcgtcagtagtgctcgtcaacaaaaaataccaaatttgctccagaagatgtgaaagcaggaagagagacagtgaggtagacccagcgagggcactgagagggcttcctttttttttgagatggagtctgtgtcgcccagggtggagtgcagtggcatgatctcagctcaccgcagcctccacctcccctgttcaagcagttctcctgcctcagcctcccaagtagctgggactacaggcgcaagccaccacacccggctcatttttgtatttttagtagagatggggtttggccatgttggccaggctggtttcaaactcctgacctcaagtgatctgcctgcctcggcctcccaaagtgcagggattacaggcatgagccactgctccaaggactgacagggcctcattcttaaataagtcaagaagtaaacacaaacgttattggcgaattacagctaatttattttttctatgaaatacttcgttaactttagttttaaaagtaaggacccccctgggcgcagtgtctcacatctcagcacttcgggaggccgaggctggtggatcacctgaggtcaggagttcgagaccagcctgaccaacatagtgaaacgcagtctctactaaaaatacaaaattagctgggcatgtaggccaggcgcg[138 bp omitted]gtggcgggcgcctgtagtcccagctactcggtaggc[224 bp omitted]aaaccccatctctactaaaaatacaaaaattagccaggtatggtggtgcgtgcctgtaatcccagctacttgggctgaggcaggagaatcacttgaacccaggaggtggaggttgcagtgagccgagattgcgccactgcactccaacctgggtgacagagcgagactccgtctcaaaaaaaaaaaaaatcagctgggcgtggtagtgcatgtctgtaatcccatatacttgggaggctgaggcgggagaatcgtttgaacccagggggtggaggttgcagtgagccaagattccaccattgcactccagcctgggcaacaagagcaaaacgctgtctcaaataagaaataaggacaattagtttaaaaggagggggagagggcactgctctgcctataaagttatcacccttttattcccttttttttttccgagacggaatcttgctctgtctcccaggctggagtacagtggcacgatctcagctcactgcaagctccgtcccctgggttcacaccattctcctgcctc[181 bp omitted]ctattcctttaaaaagaaaaaaaaaaaaaacaaagtctcccatagtcctgtgagtgcaggcattggcaggtggcatttctgctgggggagtaatgaacacgggcagcctggggggcccccacaggagcctgccgtgctaaacactagagtgttccagaccctaggcccctctccatatctggcgtagaggaacctatgaacaaggaagtgtgggcttgggtatcccgtcaggttgtgagcatttggacacaactgaaaagttcccataaaccgcagccctttcatactaggggctcctccggaaggtgctgagatccacagaggcaggtgtgggcggatccaagacatgttgggtgaactaaggaggttgcagtcatttgagtccagaacactatgaggcaagattatacatttctgctgggacagaaacacacagttgtcccagaaacgactggcctcagtacccttgtggataccaaaatttgcagaggatcaagtttctgatataaaactgtgtggtatttctgcatataacccatgtacatcctcctgtacactttaaatcacttctagataacttctaatacaatgaaaatgctgtgtcagtagttggtatactgcactgaggtgctttttttttttaagtagctccctgcacacacctttttttttttttttttttttttttttggagacagggtctcactctttcacccaggctggagttaagtggtgcaatcatagttcactgcagcctctacctcctggtttcaagtgattgatcctcccacctctgcctcccaagtagctaccacgcctggctaatattattttttctggagacggggtctcactatattgtccaggctgtatatctataactgtgtaggtaaaggatcgaaagaagaaaatctgagcctgggcacagtggttcatgcctataatcccagcactttgggaggtggaggcgggcagattgttttgagctcaggagttcgagaacagcctgggcaaccatctctaccaaaaaaaaaaaaaaaaaaaaaaaagacagcctggctcctgtctgttctgttttatatacaaagactggagaaatgcactaaaatgtcatctgtatccaaaagatacagctgctaatgtccttacacttggggggcctgctagccccacctcacaaagactcatttcatcctgtggtctagggagtgaaggttccaattcacactcactcgctatgaagcatatactctgtggcttttttttttttttttttttttttttctgttgccgggctggagtgcagtggctcactgcaacctctgcctcacgggctccagtgattttcctgcctcagcctccggagtagctgggactacaggtgcgtgcgtgccaccatgcccagctaatttttgtatttttagtagagacaagagtttcaccatgttggccaggctggtctcgatctcttgacctcatgatccacccacctcagcctcccaaagtgctggcattacagatgtgagccaccgcgcccggcctgttgcttatttttgactggctgtttcctgaaatcacttgtcaagctccaggaaatgttggagaaaggaggcccagttctgatcacacacacacagcctgggcctcactcctgagatcttcctgggctgctcctgtgggcccgagaagccttcttcccgctggagtgtacggttctgcagaccacgtagtggacgcacagccctggagtctgtgcgacccagcgtcttacttaaagtcagccctgggacctggctgggggtgtctaggtccccttctgcagctctactgttgtgcagcagggtgcgtgaacgcagtgaacgcgaacaacgcatgcaggcgcagtgggagcgcgaggagcgtgagcggctggagattgcccgagagaggctggccttccagcgccagcggctggagcgggagcgcatggagcgggaacggctggagcgcgaacgcatgcacgtggagcacgagcgcaggcgcgagcaggagcgcatccaccgtgagcgcgaggagctgaggcgccagcaggaactgcgctatgagcaggagcggcggcccgcggtgcggcggccctacgacctggaccggtaagcagatccatgctgcccttagcacgtggcgttcagaatcgtgttagggacctcacagtccagttagcttgagatttttttttttttttttg[132 bp omitted]cacctctcccggctaatttttttgtattttcagtagagacggggtttcactgtgttagccaggatggtctctatctcctgacctcgtgatccacctgcctcggcctcccaaaatgctgggattacagctgtgagccaccgcgaccggccagcttgagatctttcattcaaaggaagcataggccgggtgcgctagttcacgcctgtaatcctaacattttgggaggccagggtgggcggattgccttagctcaggagttgaagaccagcctggccaacatggcagaaccccgtctctactaaaatacaaaaaattggtcgtggtgacaggcgcctgtaatcccagctactggggaggttgaggcaggaaaatcgcgtgtacccaggaggcagaggttgcagtgagccaagatcgtgccactgcactccagcctgggcaatagagtgagactcggtctcaaaaaaaaaaaattagagacaggaggctggataaagtagtgctggttaactaaccaggttcaagggtggcacagacctcctgaggagggaagctcaggcacgtagagagcgccacacgtgccctactgcacctcctttaaggccctttcctttttttttttttttgagatagagtctcgctctgttgcccaggctggagtgcaatggcgcgatcgctgctcactgcaacctccacctcctgggttcaagcgattctcctgcctcagcctccctagtattcgagattacaggcacccaccaccacacccggctaatttttgttttttttagtagagatggggttttgccatgttggtcaggctgatctcaaactcctgacctcaggtgatccacccacctcagactcccaaagtgctgggattacaggcgtaagccaccacccccggccttgtcctggctttttaaatccattgtaatttgtttttgcttattctagaaataaagaattaaaaaaaaatttttttttgagacggagttttgctttcgttgcccaggctggagtgcaatggcgtgatctcagctcactgcagcttccgcctcctgggttcaagcaattctcctgcttcactctcccaagtagctaggattataggcatgtgctaccacacccggctaattttttgcatttttagtagataccgggtttcaccatgttggccaggctgtcaaactcctgacctcaggtgatccacccaccttggcctcccaaagtgctgggattacaggcatgagccactacgcccggcagtaagattaattttaatttctcaaacatactgaagaggaggtatgaacacaaaatgctgagcatggctgctgtgaggagtcaggtgtgtaattccagcagtgattgtgtcaggctttacacgtgcactgcaacctggcaaaaattgctgtttgttgtttctttctattgcatgggttgaagaggagcccaggtcatatatacaatgcaacttctataaagggccttgtaaactgttctaggatctattatgctttggtacgaaatccttctgatgacagttcattatggtcatctgtgtattgcagcagtacatggccagggctgctggcagggcaggaggtcagctttggggcgagagagatggcaggtgcacttgacagagcccctcggggtggaggctcacgtggtcttcctgagcggaggtggctgtgtagggctccagaagccatctgcaggcagcccataggactgactgcttaactaatggctccctctttggaaaaccgaggccgcttttcatcaggggaggtgggtgcatgggacaaaacaaaacaactgtgcagtcactggggtcaaatcagaccttgcctcctataggagagaacactcttggtgaaagtcatcctggttctgtgaagtgctaggggccagctcccacaaaggtgatagatacatttggggtgggggatccctctatctctgtctcatgtcccctcacaggcgagatgatgcctattggccggaagccaagcgggccgccctggatgagcgctaccattctgactttaaccgccaggaccgcttccacgactttgaccacagggaccgcggccgctaccccgaccactcggtggacaggtcagttgggcccctgctgggcgtgcgggttttctttttcctggctcattctgactgagaacaaggactcctgggctctctgaacccactccgttcatcagatgtatgctgagtcagacccgcaggtctcctgccttcagttagggaaattatgcttttcattgggggcctgatggtcctctctttgtgaacaagcctcttcttccccttacggtttgatttaaattgccttttcaggagagaaggttcaaggtcaatgatgggagaacgagaaggacaggtaagtctgaagctacagtggtagccacagaatttcccatagaatgggttcttttcccttcagcgtgccttcttcctgccctttctttgagcaagaggcaaaatgaggaaagagaaaagtaaagcactagaaaagtctaggtttgtggaatggaaatttgggattatttggggttagtcttggctgtcagtccaaacagttactctgaagctgtttttagccttgaccctggggttctgtgtgccacactcaccacacatgtgcaacagtgccagggaaccttgggatgtgacctggctctgctgggaagtgtctagtgagccgcacagctgactcagacaggtgcatctggggaggctgtggttgctgtgtctgtcctcgagtgcctgccctcttttgaaagtaaggacatccttcatcaccccagggcccagcttagccttggaaaacaactagatctgtggtctgtgctcattctcttcgggggctagcacattagaacaataagctccattttctccttccatcttacattgagactgagacttcccaggagagccttggacctctagtggctttccctataaacttgggggcagcacattgctgtgtggaagatgcctcctctctgaggactccactcatgagcccttcctcctcctgccagcattttctggactccaccataagcttcccgcttctgtcccccttggttccttaatgtggctgagcatagccaagtactcagctctgtctcgggatcctcaggaattccatcagcctcgtggggttcctttttccctgctcctggaggcaaattatatgcagcaaaacgtagaactagtcttgtggattttctttggtggaggagcatacaccaatggttccatgtaaaggctccagaatcagaactggcgtcacaccttggtgtcaccccttcctgctgagcctgtctccccaggagtgaaatgagggtaatattcctcctacaaagggtgcggtggtgggggtttacatgaggtgggcgcatctgtacaaacgtgtttatcattgccagctacttttttttttttttaatagagacgggatctcactatgttgcccaggccagttttgaactcctgagctcaagtgatcctcctacctcggcctcccaaagtgctaggattacagatgtgagccagcacacctggccaccagctgctttcatgaaggtgttagatatgctctcctaacagtggaacgcggtttgatcccttctcctcacatacacagtcataaatgagtcgtcagagttaccccaaagggaaatggtaacatctccctacagagaaaactagcacagaacttatgggcctcattgaacagttacgtgggttggttggacagaaaaatgttggttcaattttcaaatactaaggagagcttatttcaggagtcccttttcttactttgttgaggggaggcatcagagcacatgctgggaggataggccaggaagcaggcagtggtaacgtgggacatcgtgcacgtggtggagcatgccgccatctctcccttcaccctggcagagctctccgttgaacggggaggtgaacttggacatggacaacaaccagcctgtgtcaagggggtttccttaccaggactcctttctagtttcctttcacctacaatgtggtcatggggcaaaaaccccagagaccacatatgtattggtggaaagagaaaaaacaggactgtggagccaaagctacctcactagcttttgtgaaagtcaggctggaaagtgcttccagccacagaaataggctgtgggtgtaaatattaaccttggccatcaaataagtaggcatagagtgtgactcgccctctcttggtcttccctgaaacagcagggtcaagaactcctggtctgtgttagccacgtggcttacaaaaacaatgacacagaagagggaaaggtgggactagccaagtggaaggccagccgtttatctctcagtgtcctgtgtcttatatcctgagcagagcaaggtgcaagaccctggactgggcatccagcagaaacttccgagaaacttgactgtgaggaaggatgcttgcctagcaattggtcggatgaagggctccatttgatacttccttcactgtggaaggaagaaatttgtaaaaattatttccagaatatgcacacattaaaggtttataaacctgacctttctttagtagaagacagtaagagaatactgttggctctgggaactaaccatttgagctgtgggacccagggaatctctcttgtaagcatcatctttagtgggtgactcctggtggccctcccagctctggtggtgctgtggggacctgccttggagatgccttggtactagtaccttttttgtaccaggccatgagcctagggcacagggcctctggcctgcagatttcaggaaggcagctgtgttgtgtgaaccgatacagcctgccagcacttctgtcccgagtgactgtcgttgtcatcgttagcatgttgcctgaaaagccttggggtctgggcgctgacactgaagcttttttttcccttctggctctgtgatgtccagcattacccagaacgccatggaggaccagagcgccacggccgggactcccgcgatggctgggggggctatggctctgacaagaggatgagcgagggccgggggctgcctcctccccccaggtttgtgtcccacacccgacagtacctgaccccccccccgcccacaagggggcccgcaagtcgctgggatgtgggcacagggtgggaaacacagagggattcactctccagaagccgccacagttattagcacaagagccagagatgggggcaatccaaatcagagatgtctctctttcaaggggcagacgtgactggggggaccatggccgaagagaggatgaccggtcatggcagggcacggccgacgggggcatgatggacagggatcacaagaggtggcaaggtgaggagcagctctgggctgggaccaggatgtgctggggagtgatggaaagatggaggccgcgccttctctccttgggggagcacaggaggtgctctgctctcagtgctggaatgaggaatgaagagcactccagacaccgcctgctctctggtggtctggcccaggagttggacagtgggcgttcccgagttctctctgctgggaggaagctggacgtctatggtccctgtgcccaggtgtcttcctgggacccgctagttgtgggtacctgggggcctcaccaaagggagtggagtgggctaaatgtgccgtgggttccacgccgtgtgcgcaagttccctgtgtgaaagcacgtctgtcttccaggtggcgagagaagcatgtccggtcactccgggcctggccacatgatgaaccgaggaggaatgtcagggtaaggcatgctgggggcggcgccccttccccctgctttgcatattggcctaccttgctggaggcttaacaaccaagtccttccagctagtgcccctccccccaagggtgacgtgaggccaggcatggggtactgtggaggctgctgccactcaggaggggagggcattaggaaggggccctgcctgcaggcaacactcagggaagctgtgcaggctgggatgggccggggagcaggaggacttcgcagtcaaaccaatgtgaatttgttcctaggcgcggcagctttgccccaggcggggcctcccggggccaccccatcccacacggtggcatgcagggcgggtttggaggccagagccgggggagcaggcccagcgatgcccgcttcactcgccgctactgagtacttggaatcctgtgtcctgtctcgtggcaacaaggctatgttctgttaggagttaccttaaactgtgtaaaaatatttttttttaatctgctgccatattgtagctcaatacaatgtgaatttgtttttcgttttggggttttttttttttgtaataaatgtgtttccgttcacataccctttatttaaagtgtcatttctttatttctgcctctttaaatgaaacgaaattagacttttagttgtattgatatacactgattgttcctttttttaattattattattatttttttttttttttgagatggagtctcgctccgccacccaggcctgagagtgcagtggcgcgatcttggctcactgcagcctccacctccagggttcaagtgattcttctgcctcagcctcccgagtagctgggactacaggcgcctgccaccacacccggctaatttttatatttttagtagagacggggtttcgccatattcgtcaggctggtcttgaactcctgacctcatgatctgcccgccttggcctcccaaagtggtaggattacaggcgtgaaccaccacgccaggccgactctgtttatttttaaatatgtgtgaaacctctgggaaggcatccgggtgtggaagaggctttccagtgagacagtgattggttttcgcataatgggcctgtgcggtgcaggttttgcctgacttctcaagtcaccgagttctcctttaatgttagcacagaccgggctgctttgctcttgggtactgggtggcatccctgtcagggtgtgggggtctcaaaccctgttgatggacactggcggatgcttcccctgcggatcacactcgaaccaagcctgcgaagatttccagctgccactctccacactgacttgccaaagcccaggcaccatcatcatgtggatgcttccgcattacctttttactcagaggacaaactattttcacggcagagtcgggtggaagcagtgaaggctgaaggtcatcagcagcatctcaggcccgaggcgtgcttgtgcacaggctcagccccctcgtgccaggatggggctctgaccagcccagggctggcctctgtgtcagccggaagggacgagcccaacgccaaccctccacacaccagcagcaagctggagccacggcatctgggatccagcacctgtcctaatccaggaagccaggccagacttgggacatacctcaaactgtgaagcaagtgcctcccccattttgtaagcctcactgtagtggagagcggggaggaagcagtgtccagcagagaggaagacggcggagccccagtaacgctctagggtcccttcagctgcaaaggacagatgaccccaccaataccagtggtggcttagatggtaaaggggggccctttcctgccttaacgggaagtttgtaggtaggcagttcccggggctcactgcagcccacctcaggctctgtttctctgaggattttgggactctcatggatgatggatggctgaaacagctccaaaaatcctatccacccacagtgtgggcatcatcggggctatccagcaggagaaggaagggcaggaacggggacttgaactcacaggcctcttggcaaacttacccctgaggctccttagccagaactcggtcctgtgctcgcctttcttgcaacccgtccctggcgaagacggaatgtttctcttcagaagggatgtgacatccgggaaggaacccagtggtaacccccagcaaccacgttctcagccttcccctcgtacctttttttttttttttaaattcaagctgttcacattctctgtactttttttttttttttgagacagagtctccctctgtctcccaggctggagagtgcagtggtgcgatctcagctcactgcagcctctctctcctgggttcaaacaattctgctacctcagcctcctgagtagctgggactacaggcgcccaccaccatgcccagctaatttttgcatttttagtagagacgggttttcaccacattgggcaggctggtctcaagctcctgacctcaggtgatctgcctgccttgacctcccaaagtgctgggattacaggtgtgagccactgcactcggccccattttttttttgagccatatgcagttgtgcatgccagtaatcaatcccagctacttgggaggccaaggcagaaagattgcttaaggccaggagttaaagtccagcctggacagtataccaagaccccatttctttgggttttagggggtattttttgaaataagaaatgacgggctgggtgcggtggctccggcctgtaatcccagcactttgggaggccaaggtgggtggatcacctgaggtcaggattttgagaccagtctggccaacatggtgaaacactggctctactaaaaatacaaaaattagctgggtgtggtggtgcacgcctctagtcccagctactcaggaggctgaggcaggataatcattttaacccaggaggtggaggttgcagagccaagatcgcaccatcacacactgcagcctgggcaacagagcaagacttcgtctcaaaaaaaaaaaaaagaaatgaaagaaagaaatgacagattccactagcagagagagatgaggtctgtgaacatctggggcatgtccctacagactctttttttttttttttttttttttttttttttttttgaggcggagtctcgctctgttgcccaggctggagtgcagtggcgcgatctcagctcactgcaagctccgcctcccaggttcacgccattctcctgcctcagcttcccaagtagctgggactacaggcacccgccaccatgcccagctaaatttttgtatttttagtagagatggggttt[132 bp omitted]tcatacattcctcccaggtgtcattatcagccccagttaacagaagagaaaactgagggcacagattggacactgtacctgtaagaaccaaatgcccacagcaatgattctaaaccctaactgcatcacctacatggacctacgaatcagaatctatggcagttatggagttctctagggccgctgtaacaaattgctacaagctttttgtgtgtgagagacagtctcctgtcacccaggttggagtgcagtggtgcaatcatagctcactgcagtctccatttcctgggctcaagcgatcctcccacctcagcctgcccagtagctgggactacaggtgggtgacaccacacctggctaatttttgtatcttttgtagagatggggtttcatcatgcccaggctggtcttgaattcctgggctcaagcagtccgcctgccttggcctcccaatgtgctaggattccaggcacgaggcaacgcaggcagcccagtctcctaggcaggagagatgcctcggagtgcttctccccggccacagtcttgagtcatttgcatgggatgttctacttctaatgcccaggcagcacccttgctgtcctgctacacagggaaggacggggattcagccctgctgtcagccaggcactgagctgtacctgctcttccccaccatcctcaatataaccccgggaggctgtacaaccccattttgcagacaggaaaactgatgcctagcagggtgaactgacgagtgaggacaatcaactggcagtggaaaagatccaagcttcgaaccacccattcattcaactcccatttccacagcccgcctctcaagcagggtccccggcactgaccagatgtgttcacacaacagacccaatcagtgcctgccctcaaggtgggcacacgtgcatgtggtgagcttatgaagtgcagcttaggccaggcgcagtagctcacacctgtaatcccagcacgttgggaggccaaggcaggcggatcacaaggtcaggagttcgagaccaccctggccaatatggtgaaaccccgcttctactaaaaatagaaaaaattagccaggcacagtggtgggcacctgtaatcccagctactcaggaggctgaggcaggagaatcgcttgaacccgggaagcggaggttgcagtgagccgagatcatgccactgcacgccggcctgggcaacagagcaaaactccatctcgaaaaaataaaaaaggccaggtgcggtagctcacacctgtaatcccagcacttcaggaggctgaggcaggcagatcacttgaggtcaggaggttgagaccagcctgaccaacatggtaaaaccccatctctactaaaaatacaaaaattagccaggagtggtggcccgcgcctgtaatcccagatactcaggaggctgaggcaggagaatcgcttgaacccaggaggtggaggttgcagtaagccaagatcacgccattgcactccagcctgggggagaagcgcaagactccatctcaataaaaggaagtgcagcttcatggtacaggttgccctggccacagaaggaatggaggcgtttcctggctgggggaacacactgaaggctctgaggccaacaggagcaaacttgtgggagaaactgccagaaggctgtgggggaagaggggaatggccacaggggacagcaccatgtatttttaacactctgggagtgaaaagtctctggccatgggctacttggtggtctcttgaggttgttctatacagtaagaggagtcttttccctccaaatctggtccccatccttacacgtgtctccaggaagcagctgaagcccaggtcccagagggatagaccttgcccttagtttcagcacggcaacgtacatgagtgtccacttcggcctgcacctcagccagggaaacgtcttcattgttggccgtgcctctagtggcagccagcccaacaatgctaggctctccccaacagcaggccttcactggcaagactctctgaaccaagatggaccattgctttgtgggtaagtggagtagacaaaccagtcctcatacatccatccaccagcgcattcacccacccacccatccatccacccatctacccacccacccatccatctatccacccacctacctacccacccacccatccatccacccacctacccacccacccatccatccatccttcatctaatccattcatctgtctacctacctaaccacccacccaaccacccatccgtccatccacctacccacctacccatccatctatccacccacccacccatccacccactcgtctacccaccacccatccatccacccgtctacccaccacccatccatcctccatctaacccatgcatcctccatctaacccatgcatacctatccatccatccacccaatcatccaaccacccacccatccatccatcctccatctaacccatgcatcctccatctaacccatgcatacctatccatccatccacccaatcatccaaccacccacccatccatccatccattcatccatccatccacatacccatccattcatcatccatccactcacccaccccatccatctaccccattcatccacctatctatccatccattcatccacccacccagtcatccatccatccatccacccacccacctatccacccaatccacctacccacccatctaccccatcatccatctacgcactcacccatgaatgcatgcatctacccatctaaccactcatcccatccactcattaatccatcaagccattgactatactcatccattaattcatccatgcttactaatcatcatctttttattatttttttcttttttttttttttcgagacagagtctcacactgtcgcccaggctggagtgcagtggcacgatctcggctcactgcaacctccacctcctgggttcatgacattctcccgccccagcctcccgagtagctgggactacaggtgcctgccaccacgcctggctaattttatgtatttttagtagagacggg[136 bp omitted]agatgaagttttactctgtcacccaggctggagtacagtggcacaatctcggctcactgcaacctctgcctcaagtgattctcctgcttcagcctccccagtagctgggactacaggcgtgtgccatcacgcccggctaatttttgtattttttttagtagagacggggttctgccatgttggccaggctggtctggaactcctgacctcaggtgatccacccatctcggcctctcaaagtgctgggattacaggcatgagccactgcgcccagcccatgcttactaatcatcttccataccccaggctctatgctggggtttgggaacacgcctactattaacatatggtcccttccctcagggagcctgcatcctgttgagctaagtcacacaaacgcaaactgtggtgcccaaggagaagaaaaggtgctgaactgtgcctcagaacaggggcatggtgaccctgcctgtaggagaggagtctgccaggatgaggacgggaggggtcttactctcctgcaaggtgagatgaggcagggtgtgcagggacctggtgcccctggaatgcagagatggtgtgggggttgaggcctggaagttctctcccagcctcagcctcagcctcagcctcaaggaaaccacccctccccttggcctgcctcttccttcttccagagaccacccctggggatgaaggacaccagccctccggtggcatcagtgccaccagaggccagcagaggggtcagagcacagggcttccactgttgcctctgccatcgcctgcctccaggtaagttcttgcagttttctgagcctccgtttgctgacctgtaaaatgaggctactgagctgctcttaggatttcgggatgaaggcgccatcacagaactgcattccctctccctccagctccaaaaactgaattccgccaaggcgtagagcagctcttaagcccaagttcactgggatcactactgaaagtgacaggaggcagccaagtgtctaggcagatagggacaggtcccagtgaaaccccaccttcaagccaaaaatagcccaaaagctgaaagaccagactgctggtcctggaggaaacccaccacccagagtgagaacttctgttcctgtttgcccaccctttcctggttgattctttctgaacaatgccttttaaccagtcgaatgttgccctttctgatactatctatggcctgcccctcccctattctgagcctataaaatcctacatgtctactgacagcaaactcatttccaggaccatgttagatgggaagacgcgtggctgtcagctgcttcggttgtcaccttgtcctttcagatttaattaaaactggctgctcagcactcagcccacacggggagaagccaggttgccgctggcccgtatggcaccggatggatggggccaaaggtgggctgaacatgctctgggctggtaccatggagaccctgagcccagcatccccccagtcagggttggggaccctcagggctcacgttgctcctggttaccttggctttattattaagagacagggtctcactgtgtcacccaggctggagtgcggtggtggagtcatggctcactgcagactcaatgtcccagtgatcctcctgcctcagccggggctacaggcacatgccaccgcacccagctaatcacctccatttctgctgcacccaccattccttgggatggcgagttagcactcactccaggccagggccgggcaaagtgcgctcaaggctggagcgggaccacgggcagctgtggtgacagctgaaaggaagggcagccactcggtgtcccccacgccccagccccagctggcctccgcctatggactccccctgctctctcttctagctctgcccagcccacatcgtgatgggctagctttccctggactccgttcctagcccgtcctgcttccagctatcgagtgaccccagctgtcaaatggcactgtgccacatgccagccttgccttgctctgtggtcttggctgtgggtgtggtcaggtgtttccccagccccttcccgccttcccaaagtcacccctagacctgcctcagccacctctgctttctggagctccacttccatggccccccaactcccctgaccccaggcatgttcttgcacacaggtgccagtggatgggtgaggacgaactcatgggataaagcctgtgaccccagggaagaactaagccacattcgtggagctgcaggacccggccgcctggatggaggggaggggccagaaagcagctgctcactggcctcgtccagtccttcccctctaacagtgacggtaacaggtgtgaggctgcagaggcctcctggagcggacggacgccctctggcccagccatggcatcacagcaccgagtgcaaacccctcctgtcctcacaggctggggctggggctggggctgggtgcctgggtgcgaggcgactagaaattctgcatcccctgcgagggtttgtggtgaacagcctgggctccggacaggctgggcagacagaactgtctgtctgtgcaagtttcttcgtctgtaaaatgggcctgcagtctgctccttcctgggccttcgggaaggacttggtggacagtgtcaggggacagtgagtgcgtgggtgctccggcgagcaccggcttcctcctgcagcactgagggtcagtgatgctcccctgccctgctcatccctccctcaccctagacctgcccccaccactgctaaggcccagtaaggacaggggcatatcagatgtgggggacctgtcccgggaccacgctcctggggggaatggggtgggcaggccctgtggactccccttctaccagactaggccgctgctcccagccacacccctcctacgccctgctcaggccagtggcttctcctctctgagtgggacagtgggggagatgccccggcctctagtctctgctcctctcctctgtaacagctgtcccctcctaagctcagttccctataccaagcaacataaacccctgaactcatgggaacggggaccctgtcccagctcggtgagcatcacctgtctgctccctgctcccagggcagcatcctacggaggcctctggccccacccaagctccccaccacccccatgtgtctggagccaccagactggtttctgggcacaggcctcttgccatcacccaaccccgtggatcgccctctgtggctgggtgctgggagcctcccagggctcatgcctgatgcgggggaaccatgcaggctgccaggtagcctggccagtgtgcggcaggggtgtcagggaaggcgtcccaggggagaggcaatgtccgggagaccctctgaatggcaacaaacacctggatttccttcaatgaccaggattcccctgctagggttgtcgggagagggtggaatgagggtggagtccggccaaggaagggccgggacaggactgcggacaggagctgaggagggcaggaaccagtggccctgggggctcctgccctgtgtcccgcagggaagcagaccccacttctatccactctggctcttccactgtcctaccctggtctcagccctccaaaaccaagaccctccacaacccaggcttggccaaagcactttcctggccccagagcacagcctctggagcaccgggagcagccgctctgacctctgactccccgcaccagagcagacggcaaaggggagtgctatggcctgtggtcaaggtcaagccctgacaagccatcaggagccagaagcccaggcctcggtgctctgggcaccaccaggccaaccctgtgctccctggggccagcacacgggtcagggaacacttctgaagtcctttattgggccggcaaggccgggagctgccctcggagtggggtcccagtccggagtcttcaggtcagtggcagccctgcccgttctggccggggcaggcggcccctgctgactcgctacttggtgcgcgccttcacatactcccagccctccttggagtactcgcgggccttggagggggccaccgacagagctgacatcaccgtcatgatgcctgtgggaaagggacggccactggtgatactcccctcccagcctcacccagcctccaacccctgggaaactctagagtttgttttgggcggtggggggtgggtggggggcggggatggagtctcactctgtctcccaggctggagtgcagtagtgcaatctcggctcactgcaaccttcgcctcctgggttcaagcgattctcttgcctcagcctcccaagtagctgggactacaagtgcgccaccataccaggctaatttttgtattttatttttttgagatggagtctcgccctgtcgcccaggctggagtgcagtggtgcaacctcggctcactgcaacctctgcctcctgggttcaagcaattctcctgcttcagcctctcaagcagcagctgggattacaggtgtgcaccaccacgcacggttaatttttgtatttttagtagagatggggtttcaccatg[136 bp omitted]aggaaggaggatggacagaaaggaatggccaggaagtggggagaggggctagactggggtgtctccctccaagcaaagaaactgggtgccttacctgcattccaggagtcacggatgggaaagtaaatctttggaggggctgggagctgggaaaaagagatgggcagaaagaactggtgaaaaggctcagcagcccatccccagaggcggagggaggaggacaggccggagaatcaggtcagcatcaatatggaggacaacatcgtgcagggctggagggacctcccagagctgaccacccgccaaaccctggcctcgttcccggcccgtagtacctggggtatctgcaggcctgtctgctgacacacgtactggctgaactggtacatggcgggggggaccacctccccagccttctgtagggctgcctggctcttgtcgctgggccccagcagctcctggtcgtacaccaggtagacggcgcccccagccacacttcccttgatgaggaacctgcgggcagggacgggaggagcagaagctcagcggacactgacagccaccctcaggggccaaggcccacggggagagtgagaccctcctgagggctcaccgtccacagggtgacactctgtagtgcagcaccgtcgacccagacccctattatatacagcactcgttttacaacgtgcaaggcagggcggctggacgccacttgaactgatgaactgaaacccagagggggagagtgggtcactcaaagtcccacagtgagcaggggcagtgaagacgtaagatcttgaccttctagaagccttccagccctggagaaaccaagtgtccctgggcgcctcctgcccgctgtcactcgcagctccgagcacgcattcacttctcatccacgccagcggcaggattcaccggcattcccacctcacagagaagacaactgaggctcggaggcggaggctgacaccgcgaactgaacgccaagggctcgctgggaagcaggagggaggggattggcgacctcgggaagccccgcccctctgaagcctcagtttccctatctggcccataggcggggaacgaaggggaagtgactctaagggaagcgaagagcagatcgggaccagactggagacagggatgcccacaaaaatggactttttcggggactcgggtcccctccggcgcccccacgcacctcatcagcgaccacacccgggccaccatggtcgctcggatccacgcgcaaggacactcggctcgcccgccgcttcctgtcgcggcgccgcagaggcctctggaaggtgtagtctttcttgcccgacgcaaggtcctctgggagtcgtggtgtcttgcggctctgagactccagagaagggctgcggtctcgcagcggagggccgctgggaaatggacgctttaaggcccgggccgccgcaaggctgtctgggaaatgtagtcagcacggcgctgtttgcacctggccgcggagcctcctgggaaatgtagttcggcccggccctggcaccgtgaggggaaagaggcgtcaggtgcctggctgaagcctgaaggtgacccgaaaacaagtcagagcccgagagatccacccgcgcccgcgcgggggaccaagggcccggatttaagaagagtgtgcctacaaggcggttgtcacggcaacgagagggcgggattgttcgagcgctgcggccccctcacgtgatcgattcggaggcggggcgtccgcccagtgggcggggccgggcccctgctgggaggcgaagaccaggcgggcactgttgcccggcgacgctccggcgctgggtccccgaggcccggcccctccccgggaggaggtgggcttcgagtcacgtgacccgtgccctacgggagggggtgcggtcggggacccggcaggaggcggccgagaagagaggaccgtgggggcgttcgcgtggctcccagcccgggaccccacccccgctggacagtgggggaaactgaggcctgagcgggtgagtgcacggtttaggggtgcgcagagggtcacacgcccgctttgttcagaggggaagctaaggcccgccgaggtcaagaaggggccgatgcgttctgcagggcttccccccatttctcccgcatttcggccgggctgcttcaaccgttcatctgcccatccatccatctgtcccccacccgtctatccatctggccatccacccatctatccttccatctatccatccacacttccgttcatccatctgtccgcccatccattcatccatctgctccccccatccttccactcatccatctgtccacccatccatctatttatctggccacccactcatctatccgtccatccatccatccatccatccatccatccatgcatccgtccgtccatccatccatccatccatccatccatttatgtgttcccatttatccattcatacatccatccactcatccatctatccacccatacatctctccgtccatcatccatccatccacccatccatctattcatctggccatccacccatccatccttctatctatgcatccatacatgcatctgtccatctatccattcatccatccacccatccgtccacccgtcagtccatctggtcccacttccccctgccgggctgctgcagtcagtgtagagctgggggtggaaagagggatgagcagaggagcttcatgggctgtccctggaaggggaaaaggtggaagctcgtttcttgctgtgggcatgcctggtgtgtctgggaaaggtgaggagttcattattttgagaactgaacgattcatagatggggccgtgggagagaaggatagacaggtagtcaggggctatacctgcagggcctcatggggtgcagtgaggagcctggtttccatcagttgcagtggggacccctgagagggtttggagcaggaagggccatggccatgttgcttttgacacagacgcctttggctgcattgacagaagaggcagggagagaatgagtatggacatggggaagccagtgtggaggtgggggagaccaaatcggagatggaagggaggccaaaggaaagatgggggtggtcaggcccggggtagggtctaggagggaggtgacaatctgggagtcctggagagagagaggaagggacagctggggagagactggagagggagaactgataagatctgaaaaccatgagctcgtgggggtgaaaggatagaaggaggtgaggacaatacctgggtctcccatttagggacaggggatagtggggctatttctgtgatggtgagctgggaagagaagcaggtatggggtgacatgctgagcctggattgggtcctgctggttctaaggggcctggaggttgtcaggaggagacacccagaagacagcagaggcaaagaacctagggctggacctacagatgggagatttagggactcctcaatgatccgctccatctggtctgtctcagcttcctggttctggaagtccccttccccttgtcccattgacttttttttttttttttttttttttttagacagagtctcactctgttgcccaggctggaatgcagtggggcgatctcagctcactgcaatctccaccccgctgggttcaagcaattctcctgcctcagcaggagaccccatctctacaaaaaatacgatgattagttgggcgtgctggtgcacccacttgtagtcctagctgctccattggctgggatcacaggcatgtgccagcatgcccagctaatttagtatttttagtagagactgggtttctccatgttggtcaggctggtctcgaactcccagcctcaagtgatccgcccacctcggcctcccaaaatgctgggattacaaagtgtaatcccagcctgtgcaacaagagtgaaactcagtctcaaaaaaaaaaaaaaaaaaaaagaacctggactgtttctctctttcaccttctccctggaattagtgaatcagctcccatagctgaaatcataaatcatatcttcatctggatgacgcaggcacctctgtctccaacccagccccatgtgtcaaatgccttctgggtgtctccagagagcgagctgtctcttggcttcctcacctctcgcctcccacgtgcctcatatcactccatgatcaatctggtacctattgagcacctactgtgtacctggcacagttttgggccctgaagacccaatagggaacaaagtagaagatttccatttccttcctgcccttatggagctgatggtctacagggagagaaggatggtggaacgagtaacaaatggtccttgggctgggcacggtggttcacacctgtaatcccagcactttgggaggctgaggcgggaggatcacttgagcccaggagttcaaaatcagcctgggcagcatagtgagaccccatccctacaaaaaatacgatgattagttgggtgtgctggtgcgcccacctgtagtcccagctgctccattggctgaggcaagaggattgcttgagcccaagaggtccaggctgcagtgagctatggtcgcaccactgcactccagcctgagcaacagagtgagactctgcctcaaaaataaaaaaaaataaaaataaaaaaataaataataaaaaaaggaggccctcacttgaaggaggtcactgttctttttttgtttgtttgtttgtttttgatacggagtttcgctcttgttgcctaggctggagtgcaatggcaaatctcggcacactacaacttctgcctcccaggttcaagcgattctcctgcctcagcctcccaaatatctggattacaggcatgtgcgtgcctcagccccctgagtagctgggattacaggcgcctgccaccgcgcccggctaatttttgtatttttaatagagatggggtttcaccatgttggccaggctggtctcgaactcctgatctcaagtgatttgcccgcctcagcctcccaaagtgctgggattccaggcatgagccaccacatccagctgaaggaggtcacttttgcactgagacttgaaagaagtgagagagcaagccattgggttatatccgggaacagcattctaggcagtaggaacagcccacgagaaggccctgaggcaggatagtgactggctggtttcaaggaacagcgaagggtctgttttagtggagcggagtgagcaaggaggacaggtccacacagggcgtttgtagccaccaaggagtctggtttttattctaactggaacaggaaggattttcagtccaggagaggcaaggtgtgcagatggagagggctgagaagggtggagggggagggtgcaggtgcggtggttcatggagccgcggtggttcatggagccaccgtggtggcctggacaggtggtggctgtggaggtggataggaaggcgtggatccaaggcggtggcatcaccaaacacccaccaaacacgggtggctgtgggccaggcctgtgccggccacctctgtcccctgtccctctgcaggcccacacaggaccatgaaggtgcttctcctcacagggctgggggccctgttcttcgcctattattgggatgacaacttcgacccaggtgagcacctggggttgagggagggagaaaccgggccagctgtcctgtcctccgcccagagtgaccaccccggctatggccagccagcctccagggagcgcgagtgctgctgacaggggccaacgctggtgttggtgaggagctggcctatcactacgcgcgtctgggctcccacctggtgctcactgcccacactgaggctctcctgcagaaggtgagccaccccatgtctagatgaatggtgggggtgctcatggggggtgggaagagagcctgggtttaatccctgcaatgatccaggcttcccgtgtgaccttgggcaagtcgcctaacctctctgagcctctcagtttcctcatttgcaaaacggggacaataaaaccactttctggccaggcacggtggctcacgcttgtagtcagcactttgggaggccgaggaaagtggatcacctgaggtcaggagttcaagaccagcctggccaacatggcgaaacctggtctctactaagaagacaaaaattaggccaggcatggtggctcatgcctgtaatcctagcactttgggaggccaaggcggatggatcacttgaggtcaggagttcaaaaccagcctggccaacatggtgaaaccctgtctctactaaaaatacaaaaaataaaaataaaataaataaataaaaaattagccggcgtggtgtcaggcacctgtaatcccagctactggggaggctgaggcgggagaattgctggaacccgggaggtggaggttgcagtgagctgagatcgcgccactgcactccagcctgggtgacagagcgatactccatctcaaaaaaaagaaaaaaaaaaattagggcatggtggcgcgagcatgtagtcccagctacatgggaggctgagtcaggagaatcacttgaaccccggaggcagaggttgcagtgagccgagatcgcactactgcactccagcctgggcaacaaagtgagactctgtctcaaacaaacaaacaaaaaaacccaccttctcatgggttaggatgttgtgccaatgcagtgagacggtgactagaagatgcagtgtttcttaacaaatgagagtattgagtgtccaggcctgtgctgatagccagggttcttaaactcgaagggaaggatgggcacttcttagcaacaagcagtccattgctacttcaaggaagggtatggctcttgggcacaaacctttcaatatttcaagagaagctagcaatcaggaaattgtagatgaaatgtcctgttttagatgttggtgattgactaaccaccaaattggccagcattctggcccgcgggcctccactttgcgcccctcaagcagtggtaaatttttgggaatgatgttgaatgggtcccgaggctcagagtaggggggggttttcaggcgggggcctccctatggccagcaggtgcggtggagggggaagcgctgctgtagaggagaggcccacgggcagctctggccccccccaggtggtagggaactgccggaagctgggcgcccccaaggtcttctacatcgcggcggacatggcctcccctgaggcgcccgagagcgtggtgcagtttgcgctggacaagctgggtgaggggctgggcctgaagcctggagtccgggaccgtggcctaggccttagggacaggaccagaattgggctgtgggtgtggccacagtaacaggtgtctcagggcggagacaaatggggactgggggcgtgggcggggtggagtctcattgcgtctgggggaagagctctgaacggggcctcgttgaatgggaaccaaaccttgctagatccagggtgtaaggccaaggctgggtgtctttgatcgtagtgggagttacctggggcggagctcgctggaccagcgctctgggtggagctaagctcgggggcggggtttgatcgtttccttggggaggggcctccggggctgaccggcgtttctgggccaggcgggctggactacctcgtgctgaaccacatcggcggcgccccggccggcacgcgagcccgcagcccccaggcaactcgctggctcatgcaggtgctccgctcctccgcggccccggcccgcccctctatctcagggaccggtggtccgttcccttcgcggtccgggttctgccttctccagggagggctctccacccgtcccgccccagccacgcccctcctagcccaagcccctgctccggccttgaccccgccctcggacccgccttccgggtttctggccccgtctctgacccggccctggccccgccctctgggtttctggccccgccctgcccctgggctccgcctctgccggtgactcgcgagtgccgcctgcaggtaaactttgtgagctacgtgcaactgacgtcgcgggcgctgcccagcctgacggacagcaagggctccctggtggtggtgtcctcgctgctcggtgcgtgcacccggccccggctctgcgggacggggagtggggagctcgatgcgggtgagcctggagggtctgggcaggcttcccggacgagggggagccactcagccgctgccgtccgcgcccccaggccgcgtgcccacgtcgttctccactccctactcggcggccaagtttgcgctggacggcttcttcggctccctgcggcgggagctggacgtgcaggacgtgaacgtggccatcaccatgtgcgtcctgggcctccgagatcgcgcctccgccgccgaggcagtcaggtgaggcccggacaagctgggggctgggctgggggccatggcccagccccagccgcagtccccaccgtgccctcctgtccccaggggagtcacgagggtcaaggcggccccggggcccaaggcagccctggccgtgatccgcggcggcgccacgcgcgcggccggcgtcttctacccgtggcgtttccgcctgctgtgcttgctccggcgctggctaccgcgcccgcgggcctggtttatccgccaggagctcaacgtcacggccgcggcagcctgagcaccggggggtgcccctccagtcccagacggcaatgttcctccctccaactgtccctggagccagaacactcacagagacacccctgagagggtggccacagcccaagatgaagtcatcaagacagaaaagcaaaaccgagaaaaacgacgggcacctggaaccagtcacggcttgggaggtgcaggtgccccgtgttaggcgcctttgtcggggacttgcaaggcctcacctgtttggccatgattgatgacgtgactgcttccattttgcagatgaggaaactaaggctcagagaggccacgccacccttgagccacccatggacccctctccatctcctgcctgcgcctttaagtccctgatttattctttccattcattccatctgggaggaacccccccaactcctgccagcttcccctagctggggtctctggtactcttcacacctgcaggggcgtctacactgttcgtctacctggtggcagggtctgagcgggaggaggagggaaagagtgtgttctgagctggacccagcctcttgttcgagaataaaaactcttcttctcttgcatatctgttgttcaaattccttggtaattccaatttgctagcagccagcgggcagcgggagggggtgtgtgtatcaggggccttgactctcaatcccatttcacaggtggggaaatggaggctgagagggccaggagcagtggctcacgcctataatcccagcactttgagaggtcaaggtgggcagatcacttgaggtcaggagtttgagaccagcctggccaacatggtgaaaccctgtctttatttatttatttattagacggagtctcactctatcgcccaggctggagtgcagtggtgcgatctaggctcactgcaacctctgcctccggggttcaagcgattcttgtgcctcagcctcccaaatagttcagattacaggtgtgggtcacaacgcctgactttttgtatttttagtagagacggggttttaccatgtcggccaggctggtctcgaactcctagccttaggtgatccccctgtctcggcctctcaaagtgctgggattacaggtgtcagccactgcacccggccacaaacaaatattttaattaaaaaattagccaggcgtggtggcatgtgcctgtggtcccagctaaggaggctaaggcaggaggatcacttgagccctggaagtcaaggctacaataagctatgattacagcagtgcactctagcctgggcgacagagcaagaccctgtctggaaaaaacatgaaagcgctaaccctaattagagcagccctaaattgagactctcttcttgtatattagtagcattaaaggagaaaaactggaaacttgtgtgtttctgccacccgattcagttatttagcgtcccgtccctacaccacctaaattacatcagatgtccgcaaggggcactattacacgttgctgtattcagacctagtctag[131 bp omitted]ctgcctcagcctcctgcgtagctgggattacaggagcatgccaccacgcctggctatttatttatttatttatttatttatttatttattgagacggagtcttgctctgtcgcccaggctggagtgcagtggcacgatctcggctcactgcaagctctgcctcctgggttcacgccattctcctgcctc[134 bp omitted]tcccaaagtgctgagattacaggcgtgagccaccgcgcccggcctaatgggcgttttaacagttcatacagtttggtattattattcccgctctacaagtgaagaaattctgagaggtgatgtcgtcgatgcagggtcggcccgaaataggcggagttgggattcgaactcatttcacaggcagagggaggagagcagccatagccacctccactggttccgactccagctcccgggctcgcaggagtaaacgcgcatgctcagggagctcggtcgcgcatgctcagcgcaacggcggggaagactccagccgccagggggagcgcgtgccgttcttgcctctctggcctgcgcctcctgagccgagtagatatcccggagttccgcgcggcgccagcccttccgccacggccgtctctggagagcagcaggtaagtggtttcccgcactgccggtatccgccgccatccggactcccgggtcctctgtgcaggttggaggatggttggttgtggcgagcgaggctgaaggagccgggacgcggggctctgggcctcgggaactgagccggtactcacctccgccccttctccccgtcgctgtccgcagccatggccctacgctaccctatggccgtgggcctcaacaagggccacaaagtgaccaagaacgtgagcaagcccaggcacagccgacgccgcggggtgagtgcgggtgccgcgcggaggttgtcgggggtttcttggagggcggagggcatggcttgggcaaaggctctcgacctgaaagaacgcgcgttcgggcgcagaactaaggggggcttgaatggaagagatggggtgggggagtgggacttcctgcctggtgctcgaaggcgggcacccatctgggtttttcccaaccgtgcaatccacgctggggcagagggagcaccttgagagcggcgcggggcagcgggtttggggttctgacgcaggagtaggagttcgctcatggagctggcccgaggttgcggtgtgtgaggttgagggatttcaggtgtgtcagtgtattgggcgcctttattaagcgggcagcgggtttggggttctgacgcaggagtaaggagttcgctcatggagctggcccgaggttgcggtgtgtgaggttgagggatttcaggtgtgtcagtgtattgggcgcctttattcagcaggcagcccagactccaggtgcgtcctgccagtgttgcggagactgggacttagggaggatgggagctgctccgggcgcggcgaaaagcgctaggcgttaataccttggttctcacagctacccacagaggggaggaagtagccagggaaatcgcggcagcgcgagagaagctgcttaactagaatgcagggatccccctaccctgacggccgcccctttcccccctagcgtctgaccaaacacaccaagttcgtgcgggacatgattcgggaggtgtgtggctttgccccgtacgagcggcgcgccatggagttactgaaggtctccaaggacaaacgggccctcaaatttatcaagaaaagggtaggtgggcgctgccggccgaggggcggggtgggatgggagtcagggccgggctgacggcggcctcgtccctggcaggtggggacgcacatccgcgccaagaggaagcgggaggagctgagcaacgtactggccgccatgaggaaagctgctgccaagaaagactgagcccctcccctgccctctccctgaaataaagaacagcttgacagaagccctggctctcctgctgtccgtgggtgggtgtgggtgtgtcgggggcccgcagtcccctgtctggtgcccgctctgagccacaccctctccgggtgctgcctggtcgtgaatcaaaagccgtggcccgcccacccttcccggggcagcaggtgaggaagccgccgtactgcaaatgactttaatcattaaatagcttctatgccacactctgattaagccgactgaggtccctgggatctgggtcactggaccgagctgctcgctcggtggctccactgccaggtccgggcgcgctccccacagcgctcagttctggcccagacagggcctgacatccgccgcctgcagtcccggggtggccgtcaccgttccacggccagcgcctctgcctgctcgtccgggaaggcgatgtcgaagatctcccggtagtgttccacgaagtgcacctccaggccctcggtgatgaaggctgccaggtcgtagaagtccttcttgttctcggctggcaggacgatgcacgtcacccctgcgcgcttggcctgggggcagagtcagggtcagccctgcctgggcctgtgggagggcagcaggtgtgctaacctccaggaacgaaagggcttcctggggaccggcgatacacagtgatgccgggttctaagcagtaagtcccaaaacccaccagggtccccgtctcccacggggaaacaggctcaaggcaaaaccactggccttggctccaacagcctgagagcaggagccagggcctccccacccccttatctaggaagtctggccgtgcggtgggagcagtctcagggctctggatgagccacacacccacggcctcacatccagaggtcaggcagtgtctggggcctgaacagggttcctgtgagcatctgcatctctgcccccaggccctgcgtcacccccctcacctccggaggctacacatatctggagtagatgccaggcacagccccaccacagccccttgaaaggacagcagttcccactgtcaccgcacactgactccatggacagtgagcctcccaatttgcctccaccattttatcatctaggaagtctgtgcctggtgtccaattcaaggtggtcacagccacttgaccatgcctccctcgtggtggcatctcctgactgactgcaccaggcttcctagacacatggcaagtgtggtccagtctggggacaggcagggatgggagggaagagtggggacagtggcgctccaacctgctcagcacccttggaagaggccagcccctggccaggggctccaaacacccccgccaccagtaatcctaaacgtcgtccccatctctagcctctcccttggcgctgggctgcctgggaagagaagcaggagccacccccccaatcctactggggaagccagtggaggctcagaatgttctccacaagacttgctgtggagaaggcagctagggcggtgagcttaaggccagctccaggccagagagacctgcttccaaagcccagggcttccctctccttggcccaggcagaggttgcatggcggggactgggcctgtcccgtggtggtgtgggccctgccagtgctgtggggtgggtacagggacactcaccgcaatggtcttctccttgatgccaccaacaggcaggatcttgcccgtgagggagacttcgccagtcatggccagattctgccggacaggcctgcccatggccagggacagcagggccgtgacgatggtgcagcctgcgcttgggccgtccttgggggtggcgccctgtggaggcatgtggggatagtgggtgagcaggtggccagcagcccagggactgggcgggagcaggtgggagcggatggcgcggtcacctcgggcacatgcaggtggatgtgtgaggtcaccaggtagtcattggcgggggcgtgctgcatgaggaaggctctggcgaaggtgtaggctatgcgggcgctctccttcatcacctcccccagctggcctgtcacctccaggctgccatccttgtcacccttggcatccttgtcctgtggccgtctcagggatgtctccacaaacagcgtggagcctcctgaaacaggtgtggagctgtgaacacgggaggcctcggagcccaggccggtgctcactccacccctcggggccactctgaccgctcctgccccagtttagcatcttggtgcccctgggcaggggttggtgtcccatcgtgagccaacgctggcctctacgtttgctgcgttgcgggttcctggctctgtacgccccacagggcagcccccagcagctgccagccacagaggacacgcccagggctacaaggcccagctgccgctgccctgcagacagacacaagcccttctccagcccctcccgcaccatcccctttgccctctcgcctcctttgtgcgtggtggccccaaggcccatctggatgagcttgtccttacctgtaagcctatcaaagtggcacccaaatccataaggcccatggtgtgctgccacccccatgtgtcacagccttcccctccctcagcccagaccccctgggctcccagcacaccaccccccgccagaggccgttcagagccacctgaggcccactgcacaggtgtacaaggtgggacctgcttgttctcgggtagaaatgggaatggctttggggtcttctcccgccaccacgctcacccattgcggtccaggccagccccatgaccacgccgggcggtgtcacgtcatacatgcgctccacggtgaacacgggcttccccacgaagtcctgcaggttctcgggcgtcacctccacggactcggcctcgccgctgacaatcttgtaggccgatttccgtaacacctgggcggtcagggcaacacaatgggcacgggaaggtggggtgacaggtgcggggtggtggggtgacgggcacagaaaggtgtgacgggcgcggggtggtggggtgatgggcgcaggaaagtgggatgatgggcatggaaaggtggggtgatcagcgtgggatggtgaggtgggcggcaggtgccaggagggcgggctggccgctcaccttctccacttgcttctgcaggttgcggacaccgctctcgcggcagtactgcttgatgagcagcgtcagcacgtccgatgacagcttggccttgctctcatccaagccacacagggcgcgagcctggggcaccaggtagcgctgcaagggcaaccgtcagggttgggtctggagggaccttgcccaccagctcagtctagaacctgggagccaatgcctctcccatggcccccagaccctggcctgggaacgaggtccctgatggtgaaaccagggcctggacaccccgccctgccacccaccatgcccagaggccccaggcctttgcttgtgctgcgtcctctgcttggatccacttcctatcccccaatggtatcttagatgccgcttcctccaggaaggcctcctggttgccccatgggctggccccatacacagacccagggcctgtagggtggctgactggttacgtggctgctgccctcagcacatgaggaaggggactgggtcaggggctccagggtcacccacagccccacacaattcttgccacagttctgagctctaatggcatgggggagggcatctgtgagacggacagagccatgcaagccactctacatctgccactgatactggggggcactcctgatgccctgaggggtccccatgccccccagtcctgtccccaggaactacaggcccgtcccttggagaagtcaggctgggaactgggcccagcagtgggcattgaagcccccaggggacacgaggatgctgggagggcctcaagggcagggaccagtgcccaccactggctgtcaaagggctcctaggggagaaatgcactcagcacctttgcagaaaaaaaaacacatgagaaatatgggcccctgcatgctcctcactgaaaccacttctcctccaagcctcattctgggtgggagccacaggccccactgcttccggctgccagaaaccttccctacactctgggccaggtgggggccccaccatggggcagcctggaggccccgggagacagagtgtgtggcctgacggtggtgggcggtgttttggacagtcccaggccctaaaccctgcgcccactcgcgccacctgcagctgctcgcaagcgtctggtgtgtctctcacggccccatctgctcctcggccgcaggtcccacctgtctctcccgggcccaggagctcccagaggcacggcctctgcaggctctggggggcgccccctgctctgggaaggggacagcagtggggaggggctgggcttacctccgcaatggccagcttctcctgggccacgtagcccgacacgttgatcatctccatacggtctcgcagcggctcggggatggtgtccgtgacgttggccgtgcagatgaacagcacctgggggcggcggcaaggtgctgggggactggccgcttaccctccccagcaagcccaggccccagacaggccccccaccttggacaagtccacgggcacgtccaggtagtggtccaggaagttggcattctgctctgggtccagcagctccagcagtgccgacgacgggtccccctggtagcctcggccgatcttgtccacctggggcagcagacagcaggtggtgcccctcgccgtgcccctggccagcccgcccagtggggagaccccagggtcagggctggggagaccccgagtgagagcggcacccacaccctgccttggacgggcagcctgctgggcgtggctgtgggtgggagggacccgtccgtgccatcagggccagcatcacggcgatggcccctgagttggctcggggatcctaggacccggaaggctcggcttcatcttgcacacggcattgccgggttagggggtctccgggcctctccgcacgcacctcgtcgatgaggatcagggggttctccgtcttggtcttcttcaaacactggatgatcttcccgggcatggcgcccacgtaggtccgcctgtgggtgcacagcggggtcagaggtcacttggtagcctggctcggccacaacgacaccatgcaccctccagggccacaggggagaggccacctggagccccacaagatgtggccatgatgtgggaggcggaaatgctggcagccgccggatgtgtggcacctgcaggcacgctggtcacttgccctgactcgccagctcagattctggggtcactgattcaaagccagatctccctcagtcccatccctcagctgacaccatggtgaaagccagacaggcgctggcagcagaaggcccccactcctcactgagggacgccaggcacgcctcagccctcaagggctggggtgatactagccatggccagcactggctctcaggagggcttcctgcaagctctgtgctctgccccagcacaggggcccggcccgcgacagggacagaagaatcccaggccccacgagagacagtgaggaaggctctgtctgtgggatgaagacacagggaggcagggatggagggactgagatgccactgggatgtgtgtgacactttaagtgtgcaggggggtaaggagtgtcttagggagaggccccgagcaacgcacgtgaggagagagccacgtgagggtctgagagatgtgttccaggcccaggacacagcccgtgcaaaggccctgaaacaggaccacgcctggtgtgttagaagaacagtgaggaggccatgaggctgaggcagagggaggagggggggagagaagagggaggagagggggaagagggaggagatggagagggaagggggtagagggagggggaggaagaagagagggagagagaggagggggtggggcaggtcatgcggggtcctgtgggctgcagtgagaacttgggctttgaccgaggaacgtgggagccctggagagctgggggcaaaggagggttttgctgctgttaataacaacgatccatcgccccgcagccagtctcctgtccttgtccttgtctcaggaacccagagacgtcagcagacgcctgccctccccgcagccccgctacctggtgactccctcccaaggccagaggtgacccaggcttgttcagaaccccgccagggtctctcctccggcccgcacctccagccatccctgaaccaggctccaagaggcttcgcgaccacttcaaaccgcttgcccaggaaggactgggtgccccccacccccacccctccaccttcacccagctgctccttcctgctcagaccccagcccaaccaagggcctgcagaacaggtcccctgtcctccccctcacaccccccaccccctagtcaatctgggactccccaaagctgcactggccccacctcctccagctcctcccaactcccggctggtcagagtggccgccccctggggactggacactgcgcgggccagcatgctgtcacccttgcagcgggcgggcagatgctaggaaggcctgagccgggaggtcgggagctggggatgtttttagagaaggcagaaatgttcactttaaacctggactcaagtgaatgccttgcaggatggaaacacgtggtggactcagcagatgcctcacactcggctctcactgaggctacggtttccaaagaaccgctgtctacagaggctggcgaggagggaagccccagaaaagccgcgcccggctgcccacccaaagggtcaggtgggagggcgctgaactctgagggccgtggcccctgcttctgggcctgaggctggccgggacgagtgagcccacagaggcgccaaggtttctctggtgtgcgcggcccggtcctcactggagaccgtctctcctgactccagcccacaggcttcggggtggggggtggagccgaccccacccctagtcctggggcatcagccacagcccacatagaccagcatctgcacggcaaacgccggccctgcagctctggcccgggcattgcaggtcctatgctggaactaccgggggtgtctgctgagggccggcccgagaagtctctctcccaggggtcaagccatggaggttcctgccagcgctgtttgagcacctggaatcagctgggcctgaagtccgccacatggctggacttttcagttactccagcatgagtggaatcggttgcccacaacccggattgctctaccagatgttaaagggtgaccggagaagacgaagcccggcagcacagctgaggggagtgcgtggggagagctgtcaggccaggcctacctgtggcccttgatctcagccacgtcagtcatgcccccgacgctgaagcggaagtactctcggttcagggcgcgggcgatggagcgagcaatgctggtcttacccacgccaggggggccatagaagcagaggatcttgccctgggtggagccgcggagctggctaacggcaatgaactcctgcagacagaggcaggttcagtgggcacgtgagctggggaagccggggacccgcgcatgactctcgccacctgcacactgcctttcagacgtctgagggctgcgagaagggaccaggattgtccgggaggctgagcacatcagagctgccactggccacggggaggggcagcctgtgacaagggctccatttaacaatttaacaccaaaggacaactaggtgctaggagaccgcggccacccggcagtgccaggcccgttcagcagttcccgggaccctgaagaccgcaaatgctccactctctccggtccaacccagagaagcagtccaccaatgcctctggctcctgttttttttttttttttttttgagatggagtcttgctctgtggcccaggctagagtgtactggtgcgatctcatctcactgcaacctcagcctcctgggttcaagcaattctcctgcctcagcctcctgagtagctgggattacaggtgtgagtcaccatgcctggctactttttttgtatttttagtagaggcgaggtttcaccatgttggtcaggctggtctcgaactcctgaccttgtgatccacccgcctcggcctccccaagtgctgggattacaggtgtgagccaccatgcccaggctctgactcctgttttttaacctttgactcccacctgcctgcctggtttccaatgtctcaggagtgatattttaaaaattaatttaaaattaattaattttcagacaaggtctcgctctgtcacccaggctggagtgtagtggtgcatcacagctcactgcagcctccacctcccgggctcaagcagtcctcccacctcagcctcccaagtagctgggactgcagacacgcaacatcacaccaggctaattaaaaaaaattttttttcctttttgagacggagtttcactcttgttgcccaggctggagtgcaatggcacgatctgggctcactgcaacctctggctcctgggttcaagcgattctcctgcctcagcctcccaagtagctgggattacaggcatgcgccaccacgcctaactaattttgtatttttagtatagatggggtttctccatgttggtcaggctggtcttcaactcccgacctcaggtgatctgcatgcctcagcctcccaaagtgctgggattacaggcatgagccacagcgcccagccgcaattttaaaattttttgtagagatgggggtctcactctgtcacccaacctgatgtgcagtggcatgatcacagctcaccacagcctcaacttcctgggctcaagtgatcctcccgcctcagcctcctgagtaactgggactacaagcagccccaccatgcccggcccgtcaggcatgacttcagtccacctgggaaatcctcgagccctcgggggcagggcaggatgctacctccgccgggatccccccgaccagcacccccaggcctacgaattcaccagggggctcctttgaaatctcaacccacagcacacaagagtcctgggcccgggcacccacatgcaaatccacaacaggccagacactgggctcaccaggatgcgtttcttgacgtcctccatgccgtagtggtcttcctccagcactgcctgtgcccgcgccaggtccaggttctcgttgctgtacttgccccaagggatggacgtgagccagtctaggtagttgcgggtgacactgccaggggacagatggagagatgctgagtggagctcacgagctgcctgtctctctgctggacttggctgggtggttgcaaggggcttgaaacccatgtgtggggctgagcgcggtggctcacgcctgtaatcccagctctttgggaggcccaggtgggaggatcacttgagcccaggagttcaagaccagcctgagcaactcagcaagaccccatctctataaaacaatttacaggccaggcacagtggctcacgcctgtaatcccagaattttgggaggccgaggcaggcggatcacaaggtcaggagatcgagaccatcctggctagcacggtgaaaccctgtctctactaaaaatacaaaaaatgcttctgcctctgcctctgccctctgcctctcccctttccacggtctcccctttccctctttccatggtctccctctgatgccgagccgaggctggactgtgtgctgccatcttggctcactgcaacctccctgcctggttctcctgcctgagcctgccgagtgcctgcgattgcaggcgcgcgccgccacgcctgactggttttcctatttttttggtggagacggggtttcactgtgttggccgggctggtctccaggtcctaaccgcgagtggtccgccggcctcggcctcccgaggtgccgggattgcagacggagtctcgttcactcagtgctcaatggtgcccaggctggagtgcagtggcgtgatctcggctcgctacaacctccacctcccagccgcctgccttagcctcccaaagtgccgagattgcagcctctgcccggccgccaccctgtctgggaagtgaggagcgtctctgcctggccgcccatcgtctgggatgtgaggagcccctctgcctggctgcccagtctggaaggtgaggagcgtctctgcccggccgcccatcatctgagatgtggggagcgcctctgccccgccgccctgtctgggatatgaggagcgcctctgcccggccgcgaccccgtctgggaggggaagagcgtctctgcccggcagccctgagaagtgaggagaccctctgcctggcaaccgacccgtctgagaagtgaggagcgtctccgcccagcagccaccccgtccgggagggaggtgggggggtcagccccccacccggccagccgccccgtccgggaggtgaggggcgcctctgcccggccgcccctactgggaagtgaggagcccctctgcccggccagccgccccctccgggagggaggagtgggggtcagccccccgcccggctagccgccccgtctgggagggaggttggggggggggtcagccccccaccaggccagctgccccatccgggagggaggtggaggcgtcagccccccgcccagccagccgccccgtccgggagggaggtgggggggtcagccccccgcccggccagccgccccgtccgggaggtgaggggcgcctctgcccggccgcccctactgggaagtgaggagcccctctgcctggccagccgccccctctgggagggaggagtgggggtcagccccccgcccggccagccgccccatctgggaggtgtacccaacagctcattgagaacgggccatgatgacaatggcagttttgtggaatagaaaagggggaaaggattgagaaatcggatggttgccgtgtctgtgtagaaagaagtagacatgagagacttttcattttgttctgtactaagaaaaattcttctgccttgggatcctgttgatcggtgaccttacccccaaccctgtgctctctgaaacatgtgctgtgtccactcagggttaaatggattaagggcggtgcaagatgtgctttgttaaacagatgcttgaaggcagcatgctggttaagagtcatcaccactccctaatctcaagtacccagggacacaaacactgcggaaggccgcagggtcctctgcctaggaaaaccagagacccttgttcacttgtttatctgctgaccctccctccactattgtcctatgaccctgccaaatccccctctgcgagaaacacccaagaatgatcaataaaaaaaaaaaaaaaaattagctgggcgtggcagcggacacctgtagttccagctactcgggaggctgaggcaggagaatggcatgaacccgagaggcggagcttgcagtgagccgagatcgtgccactgcactccagcctgggcaacagagtgagactccatctcaaaaaaaaaaaaaaaaaaaaatttacaaactgccctgtccaaagcacccagtgcaggaaggaggagatggccggaggtccactgctgactcatcaggagagccaagacggcactggcttctgcccagggctgagtgagcagaaccacagaggggacgaggcttagaaaatgggacaaggcctgacccagggcaggtggggaaatggaggccaggtcccctgccgggagagtgacgctgaaggttgggagggcaactccatattggtccccaagttgggagccgtgcagcagtgagcagcggccactatgggccaggagcaagtcagtgagggctgcaagagcacacggcaggattggggaagaggatgaagaggaggacggcttccgaggaagggccaggcggccccacgagcagacaccgtcagggcgcactgccacccaacgggcatacgagacgcaccgggacaggccagctgggccacacggatgctggagtttagagacacatgaagtcactgtggaagtgacacaggcagtgacactttgcggagagcattctgggtgggagaggtagctggcagcctgctgcaggcatcttggtgacacgcaggtactgagggcttgtcccccgtgacttcccaggacctgaggacagaacccgccttacagaccccctcagctcctgggggaaggagctatctgcttctgcaggacaaggcccggtctgagcaggtacttccaccagcccaagggcagctgaggcactcgctgggagacagaagaaccccgaaaacatctacgttctccccccacaggaggcggcggcacaggcctctcacatggcagcagggaactgcagatggggctgagtgaaggtccccgagacaggagagcattctgggtgacccagggggcccaggttcctcaccaggtcctcacgacaggcggtgggaggtgagagactgactggaagaggctgcgctgtggctgtgaaggaggaaggggccccgagccgagggatgcgggcgcctccagatactgggaaaggcaggaaacggattctcctctggagcctctgggagggacgggcccggcccacagcgggatctcagggctcggcattgtgtaaggcactaagttgtggcaccgtcggagcagccatgggagctcacaggccactcaccgaaatcggggcgtgctgggaggggaagccacagccttcgcgcgcaaccagtgcctctcagggccctgggggagagactccggcgaccgtgacattcaaatctgaggcggggtcctgggccagcagccaggaaagaaactcatgccttccctctaagcgctgtcctacggcctgcccagccctgccccggggacttctgcctagaagctgccctggcgtgacaactggttcctgggctgaaaacagagcatgctgcatgggaagtggccaggtgggttctgtcctggctggacatgggcatggctgaaaggatctcagaggtacctgaggccctcaaacctggggcggccaccctgactcatggcatgctcaggacagtggcccccgggcaaggccagtgctgcgggaaggcatggtcacttcctggctgactctcgaaggggcaacagaagccaggggtagccttgcaaagacagccatggggactcctggtcctggcgagaaggcctggcttaggccaggcgtggtggctcatgcctgtaatcccagcactttgggagggcaaggtgggcggatcccttgaggtcaggagtttgagaccaacctggccaacatggcaaaaccccatctctactaaaaatactaaaaattagctgggtgtggtggcacatgcctgtaatcccagctactcaggaagttgaggcagtagaatcgtttcaacctgggaggtggaggttgcagtgaaccaacattgcaccactgtactccagcctggacaacagagcaagactctgtcttaaaaaaaaaaaaaagccaggcatggtggctcgcgcctgtaatcctagcactttggcaggtcaaggcagccggatcatttgaggtcaggagttcgagaccagcctgaacaacatggtgaaaccccatgtctcctaaaaatacaaaaaattaaccaggcgtggtggtgcatgcctatagtcccagatacttgggggactgaagcaggagaattgcttgaacccgcaaagcggaagttgcagtgagccaagattgtgccactgcactccagtctggacaactgagcgagactccatttcaaaaaaaaaaaaaaaaaaaagcagccctggcttagagccaggcgtccctgggctcaaatccgtggcaccacctgccaattcacaggccctggccaccagctcaacagccccgagcctcgatttccttgtagaatggagatggtgatgatgtgtcctgcccagaacagggctgatactcgctggatgcctcccagcccgcacctgccacaccaagaaggtgccacggggctccccgctgggtcccctggcctgcctaagatgggggctgaggaggggtcacctgagggctgggccgccccgggcctggcactcacttgaactccgaggagtggttgtccagcaggcccagcttgctcagctcctcgtccacaacatccatgacgtgcttggggaccacgagctccttcaggcgctcccggaacttctcctcgatggcatccttgtcgtccttctccaggcccagctccttcttgatgatctttagctgctcctgcagcaggtacttacggtgggtctgcttgatcttctcctccacctgtggggtgaggtgctgccatcaggccctggctccgggaagctgggtgggtgggtgcgtccccagacgaagggggaccctctgctcccccaggactcagagagaaaagaaacgaaacccagagcacgaagcctttggttccttccatcttcttttgtttttgagacagggtctacctgtgttacccaggctggagtgcaaaggcaccatcatagctcaccgtagcctccacctcctgggctcaagcgatcctcctgccttagcctcctgagtaactgggaccacaggcacctgccacacctggctctaattttaaaattttttgtagagatggggccaggcgcggtggctcacgcctgtaatcctagcactttgggaggctgaagcgggcggatcacttgaggccaggagttcaagaccagcctggccaacatggtgaaaccctgtctctactaaaatacaaaaattagccggtgtggtattgcacgcctgtaatcccagctactcgggaggctgaggtgggaggatcacttgagccctggaggtggaggctgtagtgagctgagattgcgccattgcactccagcctaggtggccgactgagaccctgtcttaaagtaaaaaattctgaaaaatgctacgaccgtgaggtgaccggccatcaggcaggctgtgatctgccgaaaatcatgacagcgagcctcaatggctgggtcttaagaaacagcatcttcacttttcccaggctgctttccaatttccaacactgtccccaagattacaaaggcaaaggaattcttcccttaatgttggacggtcctgagactgctccaccctgggctcattacactgggaccagctttaagcttccctgttcaacgcggagagttccacagcccaggacgacagagcagatgatggcacgaagccctcaaaacccagacaggccttcttggcttgccctggccgatgccaccggtccctccgtgtgctccagagcctgactgatgtcacgtggcccgaggggaaggcccccaagagtggctgcgcctcagccgcgggctcacctcccgccccaggcgctgctgcagcttgctcagttcaaattccttcttcagcagggagagggccttgtacagccgcttaggaatctgccgagacagggaggacagaaaggatgagcagaagtcggcatctgtgtgtgtagggccgaggttgggggaaaatgcgcaccctgagagatgctgccgggaggacctggccatgctgtacccagcacagaggcatgtgtgccctctgccccaacaaatcccgtgctggaaacgcatcctacggatacttcacaggccctccagctgcgtgcatggggacgcgctcaggagtgctgctcacaacagcaaaagactggcaacgccccgggtacacggcccagaggatcccactgaacccgcaacggtgactcccaaccgaaggctatgaagccaccgaaaggcggatggatgtggaccaagacacgcagcgggaaatcatctcaaaaacagagccagggacacacagctgggtgtggatggtgcacggtggagggacaagggcagccaggcatgggggagctgaggaggaacgggggcagccgggcgtgggcggagcatagtggaggtggggtgcagccaggcgtggggggctgtggaggtgacgagcactcacattggtctcttccaggacgtcctgcagctcatgggactcggccccggtgagcgcggcgcccatgtcgctcaggtagatggggttgtccaccacccgctggccagcctgcatcatctgcagcactgactccctgggggacaaagggagctgcctcggtggccagggcctcacgctctgctgcagtgcagcccccaaacggggacccggtcctcagggtccctgtcccctgtagctatgggcacggtctaggggtgctcgctgggagccagctctgctgcttgttctccagagttcagggcccacccgtcctgggctggaaaggcatgcagcatcctcacgtgcagccaccacgggagccgtgcagtgacctcacctcagcagtctgctccccactcccccagccaatgccaccaacagcttccggcctcagcagaaggggacaaagaaactgggcctgctgagtcggccccgggcctcccacctgccccatgccccagtgggcaacgggctcctccacacaggccactccttggggcaggcaaggtttcctcccaggaggacgctgaggaagccccctacccacccagctgcagaaagagctgcagagatgcccccgcctggccagctgcccgcacagaggcccacctgtagagagggttcaaggcaatgatgtcccggatggtcttcacgatctctgcagtcagggcctgccaagtatggggcagggtcgctggggcccagcagtgctccagcagggggtgggctgggtgggagcatggccctgggagccccacccaccagctccatcaactccctcccctccgccaactggccctggccacggacggcctgggagatggaggagtgcagtccctggtggactcaccagtcccagggacacaggaccaagagagtcaaaactaaaaccaaaccctgtctccttacccctcagagccttgtccttaggataagctatctcaggggaaaaaaagagactgtgttttctttcctccattt[131 bp omitted]ctaccaaaaaatacaaaaattaggcgggcgtgatggcgggcgcctgtagtcccagctactcgggaggctgaggcaggagaatggcgtgaacccaggagat[140 bp omitted]actcactgcagccttgaattcttgggctcaagcgatcctccccgctcattttccggagtagctgggaccacgggcataagcaactgcacctgcctacaaccaaattttaatcacctggtcttggccgggcgcggtggctcacacctgtaacaccaacactttgggaggcagagttaggtgggtcacttgaggccaggagctcaagaccagcctggccaacacggtgaaaccccatctccactaaaaataccaaaaaaaaaaaaaaaattagccaggtactttggtgggtgactgtaatcccagctactaaggaggccgaggcaggagaatcacttgaacccaggaggcggaggttgccatgagccaagattgcgccagtgcactccagtctgagtgacagggtgagactctgtctccaaagaaaccgtaatcacctggtctctagtctttggctttgacgctgaactgtctgagctgaccctggtagaaggcaccagaacaggcccactggaggtccggggcacttgctttaagaataagttcagctgggcacagtggctcacgcctgtaaccccagcactttgggatgctaaggcgggcggatcacgaggtcaggagatccagaccatcctggctaacacggtgaaaccccgtctctactaaaaaatacacaaaaaattagccgggtgtggtggcgggcacctgtagtcccagctactggggaggctgaggcaggagaatggtgtgaacccgggaggtggagcttgcggtgagccgagatcacgccactgcactccagcctgggcgacagaggctccatctcaaaaaaaaaaaaaaaaaaaaaaaaaaagaacaagttcgctgcccctaaggggtcttgccagttctaatcacatttgtaagtttggtcgctgtcttccccctgttgcaagattctcacagggaatgccccaatgctgagctgcccaggacagtgtagccgctggtggctgtctgaattttttttttttttttttgagacagagttttgctcttgttgcccaggctggaatgcaatagtgcaatctcggctcaccgcaacctctgcctcccaggttcaagcaattctcccgcctcagtaatcccgagtagctgggattacaggcataagccaccacacctggctaatttttttttgtatttttagtagacacggggtttct[139 bp omitted]cactctgttgcccaggctggagtgcagtgatgcgatcacagctcactgcagcctcaatctcctgggctcaagcgatcctcccacaggttagaccactggtgtgtgcgaccatgcccagggattttattttttttgtggagacaggggtctcaatattgcccaggctggttttgaactccagggctcaagtgatcctccttccttggcctccaaaagtgttgggatgacaggcatgagacactgtacccagccaataaaatgttccattctgttccttggccacagcagctctacttcaagtgctcaatactcacaggtggccgggcacagtggctcacgactataatcccagcattttgggaggctgaggtgggcggatcacccgaggtcaggagtttgagactagcccggccaacatggtaaaacctcgtctctactaaaaatacaaaaattagccgtgtgtggtggcacgtgcctgcaatcccagttacttgggaggctgaggcatgagaatcacttgaacctgggaggtggaaattgcagtgagctgagatcgttccattgcactccagcctgggttgacagagccagactctgtctcaaaaaaagaaagaaaaaaaaaaacctcgcaggggtagtggggcaggatagaagtgctgacctcaagaacccaggtgggcctgtggacaggactttccacccctgccagcgcccacagcagacatcaccagttgctcacagcacttccccctaggccctgcagcagcctggggaagaggctgatgacaccaggcacacaggtaaggagctgacacgcttcaggcctttggttagcttcgctgactgtccctacagcgggagggcaggtggcaccgccaagagcctgcccacctcggaagctgactccttgtgccaccaggcaggcaggacggcctaggttgggggatcagggtggccaacaggctgtttcctgtcctgcaaccactggtaccaacctcccaggcttggtgggaagaagccagggctggaaggtgtcttggtaaccgctggaggctttggcacaggggacacgggctggggctggacctgggttccaaccctgtctccttcctgagcagctacaggctccagcgaatttcctgtgcctctcccatcccagagtcttccgaagacctctgggaggaaaagcaccctctatgttccattagaattgagttccagacaggccagacccttcctaaggggctcagggtgggagatgactcttcggagaggccgcaggaacggctcaagggagcccgtgggggaggcagctgtggccgccctgcgtgacgcacggactcactttcacctcctccgtgacctggaagtcctcgtggacaacgttctctacctccaccatgagcacctcagccgggagctcaggggtgggctccatcgccagctccgccgggtgcctggcgctcagctcgtcctccgcctccttcttgccccgctttgacttcctgcggggcttgtgcttgttctccgcctccggctcctcgggctccacctccagctgtctgctgatatggactctgacacgggagcaaggcaggtgtgaatcagccgctgaggctgggagctggacccggctgaggcctccctggtggcacaggtggtccaagggtcccgctgagcccagacctctggagccacagggtggctacagggtcctcaagctggagacgtgagccgctttctcggggcctcccaaccagtgtcccctccaccccttagactccagccagattcaggcattccctgcatcccacgccaatgcatcactgtccccatcctaagtatcgtggataagctgcagtgacaagccccagggcctcctgtcgaaaacggtgtcagcctggccgggcacaggctggtctccaagactctgtgccctggactcagctcatagcagctccttcctgttgttcaggtctcgatttcaaggacaccatcgcaaagactgtccccaagcacttcacaaaagctacccacctccacctctcacgctgtctgcgtctcccctcagagcacctggcaccacctgaactcagggtctcgctctgttgcccaggctggagtgcagtggtgtgatcatagctcactgcagcctttacctcctgggctcaagcaatcctcctgcctcagcctcccaagtagctgggactacaggaacacgccgtcacatctaactttttattattttttatagaaacagggtcttgctgtgttgcccaggctggtctcaaactcctgggcttaagcgatcctcccacctcagcctcttgcgtagctgtgaccacaggcatgagccaccacatccagctaatttttctacattttttgcagagatgggatctcgctacgttgcccaggctggactcaaactccgggctcaagcgatccaattgccttgacatcccaaagtgctggaattccaggcaggagtcaccatgcctggccctgcagctcacccctttctgagacaggaggggtccagaggtgacatgtctcactctcacccccagctctggcctcagtgctagtgagaaagccgctgggctgacggacagggcagaggctgatgctggggcataaggcatcctggctggtctcccgcgtggtactctgcccccacctcccactgtcccccgccagccacccaccttctgtgtcccatgacgatcatgcgcagcttgtccccaaggtcctgcatctcatggatctgggcaaacgtccccgtgtggtagatttcatccaggctctcgaccacatccgactcattgctgtgggagaagagcacagaggaatgttggaacatggctttcatgctaggcaggatgtctctggctgagatggaggagggagagaaaagaaacgcccctaccaaatgctactgaaaaccaagagcggcctccttggctcccgcaggagctccagagcctaggggagcttctgccaggccagggctgccccagtggtcacaggaccgggtgggtggctcctcgctaagtcagccacaaagacatggtccaggtgggactttgatgagtctcttctatgctatcacagagcctgcttcgaatgcatgcatggaactctttttttcttgagatggagtttcgctcttgttgcccaggctggagagcaatggtgtaatctcagctcactgcaacctccacttactaggttcaaccgattctccttcctcagcctcctgagtagctgggattacaggtacctgccaccacgcctggctaatgttttgtatttttagtaaagacgaggtttcatcatgtcagccagactgctttggaactcctgacctcaggtgatccacatgcctcagcctcccaaagtgctgggattacaggtgtgcgaccccacgcccggcccatggaactcatttctacatggagccacatctccgagcagctagctcgactttcaggtagcctcatggagcatttcatcactaagagtccctgaagttaatttcccccgtatcttaacaatgcatgaagtttagtactacaagctgagttctcagcccaggctgaaaaggtagcctgcgtggcttctggcctttattctggaggtcttccctggtttcctcggggtcaggggtcaaaggtgcaaagtacagagtaggacttgtggtgagctggactctagggcaccgtcaacaagggaatgaaggaaaaatcacacttacctgtcatctctctttagaaagacgccgacataaggctgggcgagacgaactttccttctcagcagctcaaccaacttcttatttttaacctagcatgacaatgaccccaaagtgaaatgcagagtagattttttttttgagacagagtctcattctgttgccctggctggaatgtaatggcgtgatctcagctcactgcaacctccacccccactgagttcaagggattctcctgcctcagcctcctgagtagctgggattacaggcatgcaccaccacacctggctaatttttttatttttagtagagatggggtttcaccatattggccaggttggtctcgaactcctgacctcaggtgatccacccacctcagcctcccaaaatgccgggattataggcgtgagccaccaaacgcagcacagggtagcttttcttttttttttttttttctgagacggagtctcgctctgtcacccaggctggagtgcagtggcatgatctcagctcactgcaacctccgcctcccgggatcaagcaattctctgcctcagcctcctgagtagctgggattacaggcgcccgccaccaggtccggctgattgttttgtatttttagtagagatggggtttcaccatcttggccaggatggtctttaactcctgacctcgtgatccacccacctcagcctcccaaagtgctgggattataggcgtaaactaccacgcccggcctcccagggtagcttttgtagctgacattttttgacagcagagccgctctaacgctgtgtagattattctctggggacatgctgatccgcatcctggatactaatcaacatggtttgggaacgcctaaacaaaaaaaaaaaaaaaaaaaaaaaagtgctggaggccaggaggctgtggtggtgaatacagtgagcagaactgaccagctggattcttcttagcggtttccccactcccaaaggaaattcaaagtagacgaatggtcagaacccagaaattgatttaacatccagcttcaaaggggatgtccagggcaaactgtcttggtttgaaaatcaaaaccattctgcttttattaatgtcagaataaacataagtaatttaaatgtgacccactccaga[223 bp omitted]gaggcaggagaatggcgtgaacccgggaggcggagcatgcagtgagccaagatcacgccactgcactccagcctgggcgacagagtgagactctgtctcataaaaaaaaaaaaaaaaaaaaaaaaaaaaaaaaaaaagaaagtttcactctgccacccaggctggagtgcactggtgcaatctcggctcactgcaacctccacctcccaggttcaagcgattcttccaactcatcctaccacatagctggggttacaagcacacgccactgcactcgctaatttttgtattattagtagagacggagtttcgccatgagccaccatgcctggttcctccaattttcattgacagttacttccttatcacatcatatgctgttcattaatgatcaagacccccaggatcacagcacattctcaacggcaggttcagggctaatgatgtcttctaagaagcatttgaaggcgcaaggagctcacctgatttctttcaagcctttgttaattcactggacagaccctgattaaaggtaatggcctggctagcctggtaatggtagctcatgcctgtaatcccagcactttgcggggctgaggtgggaggatcgcttgagcccaggagtttgagaccagcctgggtaacacagtgagaccccatctctattttctttttgaagtttttaattctttattatataataaagttaaaatatacatatatatatatatatatatatatatatatatatatatatagtaatggccctcaaacttttgcaggcaccaggatgacctgaaggactttaagcagctcactgctgggccccacccttggagtttttgattcagttctagggtgggtccaaaaatctgcatttcaaacaaaagagcatcacatgatgccgatgctgctggtccacaaccatcctttgagagccagtgttttgactcactccctaacacaggctcttaacttgtggtccagaaattcctgacactatagatacataattttttttttttctgttcccagaaaaaaaaaagtcagtaacatctgacaggagggtgtgtgacccactgttataagtaaaatgtttgtttagagacagaacgcttgtacctctgtactgtaaggaaaaattagcatttggacaaaaagttttcttagcaagacaattttactttctgaagaaagggtgctcctcgcagatggaacaatggcgagagcagagcacacctgaacaaaggagggaagcaatttttttttaagacagagtcttgctctgtcgcccaggctagagcgcagtggagcgatctcagctcactgcaagctccgcctcctgggttcacaccattctcctgcctc[135 bp omitted]agcctcccaaagtgctgggattgcaggcgtgagccaccgcgcccagcccacgaagttagtttttaaaagaaactaatacttctaacacttatgatttattctttaatacccaccaaaaattaagagccattgttccttactcaaaagttgctaataggagagaagcttctagagcaagttggccagacaagtcaagtacaaactgaagagtaaatcaagctttgctaacaatttcagaaacatttattgggtcccaaagaagttgcctcccaatttcccctctgccaacagctgatagctgcatccttggcatctgcctcctggccttggcaggatccatttttatgatttacaatgcatcatcaaccagaaatacaatgagaaccacctgccagtctcccaaatactatctgcagccactcatttaactctcctggctagctccacgtgggccgtctgaactctcttagaagaatcatctctctgctcaggcaccgggagcaaggggcatctgtcgctctgcagaacggaggggaccaggcctgatgaacaccatcctgggcccagaaacctgggagggtaaagagaactgccaggggtgaagtcaaggatgggaaaaaggcctccggggcagagtcctgaaatgtcagaagtacaccaaagaggaaacagcatcacgttattgctgaggcagggcctcattctgttgcccaggctgcagtgcagtggtgacaccatggctcactgcagccttgatctcccagtttcaagtgatcctcctgcctcagccttccaagtagctgggaagacaggtgcatgccactgtgcccggcttttctttctttctttttttttttttttttgtagagacagggtctatgttgaccatactggtttcaaattatgctcctgcctcagcctcccaaagtgctgggattaaacatgtgagacaccgtgcccagcccacatggcctcatttaaatcccacaacaactctaataagacactaatatgtccaggtcacagatgagaagagggaagccaaaggaataacttgctgaaggttatggagctaggataggaccccacaaggtcttgctctgggggcctgcatcagtaaccagtactcaacatcaaggaaaggccttggggccgggcgcagtgactcgcacctgcaatcccagcactttgggaggctgaggcgggtgaatcacttgaggtcaggagttcgagacgagcgtgggcaacatggtgaaaccctgtctcttctaaaaatagaaaaattagccagccacggtggcgggcgcctgtaatcccagctactcagggggctgaggcaggagaatcacttgaacccgggaggcagaggttgcagtgagctgaaatcgcgccactgcactttagcctagatgacagagtgcaacttggtctcaaaaaaaaaaaaaaaaaaatcttggagcagcgttggagaagctccctctgtcccctctctactggctgctgcccctctgaaatggcctttcccttcccaacagatccttgagatttgtttagaagagtctggagagtgagcgcagaggctgactcactgcgtgaccttgctctgccagttaggagataaccttcccatagatgccactttccacatcagtagtttttttttttaagggaaggggagctgggggagaaggcttttggggccttcctactgtaaaagctcaagttccttacactcactgctttctctctattacatcatcctgctccctccccacccccaaggctcttagtctgaaatgatctaatttctaccaccggaatgacttgttctctacagtattctcagaacttgctacgtggtaggaggtcaagaacacactgaataacccacctcttcccaccctcctaagcctcctgtcccatccatgctctactatttctcgtaattattgccttctaatacaatatcgttactaaacatctttattgcctgtctcatcctgccaaaatgtaagctccaaggcagatttattttttaagagacagggtctcgccatgttgaccaggctggactccaggtttccaacaatccttccacctcagccgccagagtagctgggagtacagcgcgcgccaccatgcccagcttcaaaggcagaaatttttgtctgttttgttcactgccatatccccagaacctagaacactctctggcaaataataagcaatcaagaagtatttgtctaagaaaggaatgaattctgatcccagtgaggctcgtaaccagacggcagagcgcctggggcgaggaggtattacaaaactcgtgccaagtaaggagaaaactaacagcgccgtaacactactcaggtccctcccggccccggatttctatgaccggcgttctaaagtggataatcctaggctcatcgggttcaactcctctcatctaacggatcctaagaaatccgaaagggagaggactttggctcaaggttcccaagctagtggtgagcagacaaggattcgaactgcacccttcgagaaacttcatgtctgaaaaagttgcgaaacacaagggcgctcaagtgatcccacggttcagcccgctgcttgcacaggtgggaaacctgaggccgaggcggggactcccattacctcgataatcttgataaagcgcgggaacaccgggttgcgggtgatggcgatgagcggcaggtgcggaaacacatcggggatcgtcatgggcgtgagcgccgttatgaccgggccttccccggcgcccgcgctgccccccgcgccgccggctccttcctccgcgccgccctcggaggcgtcctcgccccccgagaatgcgcctccgccgcggctgctcgcttcccaaaacccccgccattggcccccaattgccgggcctcggccccacagtgcccaaggaggagaggcgtcgcaggtccgctggcctcggagcaaccacgctcctgctgcagtgggaacccgccccccggcggcggccagcatcggccgccgcagcacccagcaccgcgccgctccccacagtcgcacgtagccagtgctcgccgccatagcccggccatactggcggctcacacaactcgcgtcatttccgctcgccgcgaaacgcacgtgacgcccggcgcgtgcctcggtacccgatgggcgcgtggctcgaaacagccgcttcagggagctgggcctacgcggagaagagggggcggagttcgagcatcggatcgtctccgcctcttccggtctcccactttatgcgctgaaggccttttccggtcacgtggaaggctgtgagcaggcgccagcgcccgtacaaaacactggtagtgttgcaaacgcaacgtttaggaactcatgagcagcctgtgcacatgcttaggcgcgcggacaacatgcgcatgctcagactctagactggccacgggtggccgggtgcgcatactcaggctctgagcgcactttggggtgcgcggattcgggcttcccgggattcgtctgcgcatgctcaagattcaggcggagcgccgggctgcagtgcgcggaggcccgctcccgggactcattgatgcgcatgcgcagggcttcagcctgcacgtactcggattgtgcagcgactccccgtggcggttgaggggcagtggtggcggcggaagcccaagtcgatgctgatgttgatgctggtggcggctgtgaccatgtggctccgaccgctggtcacagctcagctctgtcggtggggctgccaggactcctggggctggggtgctgccgggggtcgggagggtgctggttcatcttggagccgaggcctgctccccaacctcactgaggctccccttttactctttttaggaatcgaacttgacgcctcgctcaccctactccaccccatcctcccagcccgatattaagctctcctacctctttttttttttttttttgagacggagtctcgctctgtcgcccaggctgcagtgcagtggcgcgatctcggctcactgcaagctccgcctcccggattcacgccattctcctgcctcagcctcctgagtagctgggactacaggcgcctgccaccacgcccggctaatttttttttgtatttttagtaaagacgggggtt[143 bp omitted]tgctctgtttcccagggtggagtgcagtggcgcgatctctgctcactgcaacccccgcctcccaaagtgctgggattgcaggcgtgagccaccgcgcccagccttacccagcacattttgaaatttcagtaaatgttaggttagtgcatactccaacctgccatggggaccagttgctgaaactccgttcctgccctcagggaactcccatctggactaaactgtcacattcagtagggacctgtgagctgtattcttagggtgtatggcctcatttgatgtttacaggaagattcataatgattccttaaccttattttattttatttattattattttttgtacagatggggtctcactggctgggtgcagtggctcacgcctgtaatcccaacactttgagaggtagaggtgggcagatcactcacttgaggtcaagagttccagaccagcctggccaacatgatgaaacctcgtctctactaaaaatacaaaaattagccaggcttggtggcaggtgcctgtaatcccagctacttgggaggctgaggcagaaaaatcgcttgaattcaggaggtggaggttgcagtgagctgagatcgcactccagcctgggtgacaaagggagactctgtctcaaaggaaaaaaaaaaaaaaagagatggggtctcactgttttgcccaggctggtcttgaactcctaggctccagtgatcctcctgcctcagcctcccaaagtgttgggattacaggcatgagccacccatgcccagccatacccttattttatttttttgagatggagtcttgttctcgtcgcccaggctggagtacaatgtcacggtctcggctcactgcaacctccgcctcccaagttcaagcaattctcctgcctcagcctccagagtagttgggattatgggcgcctgccaccacgtgcagctaattttttgtgtttttagtagagacagggttccaccatgttgcccaggttggtctcgaactcctgacctcgtgattcacttgcctcggcctcccaacgtgctgggcttacaggcgtgtgccaccgcgcccggccaacacccttattttatagatacgaaagcatacttaggaaagttaaagacacacttgcctaacaacacatacctagtaagtgggagaaacattttccagtgaaatttactaataggatttgtctcgagttctgaaaatgtgggttatatccagttctctcatttccccacacaggctctcaaagaatggtccctggaccagcagcatcaagatcacctggaatttattataattggttagaaatgcagttccctggacctactgagtcggggacttggcagtgggacccagcaaacggtggtttatcaagacccccccccccgcaaccccggtgattctgatgcatattcaagattgagcacctctgctgtaaactataccatccttccagtcaccacacactcccttaaggagccccgaataccttgttgcaggacttcataattttcc[182 bp omitted]tggcgggcgcttgtagtcccagctactcgggaggc[132 bp omitted]agaaattttcagaaatcatttctacattttgtgtgtacttatgtctgtttctgggagaggagtttcatacaaattttattttttgacggaggcttgctctgtcgcccaggctggagtgcagtgtggcaagagctcaactcactgcaacctctgcctccaaggttcaagcgattctagtgcctcagccctcagcctcctgagtatctgggataacaggcgcccgccaccctgcccagctaattttttttttttttttttttttttgagacggagtctcgctctgttgcccaggctggagtgcaatggcgccatctcggctcactgcaagctctgccttctgggttcacaccattctcctgcctcagcctcccgagtagctgggactacaggtgccgcaaccacgcccggctaatttttttgtgtttttagtagagacggggtttcaccgtgttagccaggatggtctcgatctcctgacttcgtgatccacccgcctcggcctcctaaagtgctgggattaacaggcgtgagccaccacacctagcctgttttgttttgtttttgtttttttttttgagatggagtttcactcttgttgcccgggctggagtgcaatggtgcaatctcagctcaccataacctccgcctcccgggttcaagcgattctcctgcctcagcctcctgagtagctgggattacaggcatgcgccaccacacgctaattttgtatattacaggctaattttgtatatttagtagagacagggtttctccgtgttgctcaggctggtctcgaagtcccaacctcaggtgatccacccgctttggcctcccaaagtgctgggattacaggtgtgagccaccgtgcctaacttttttgtatttttagtagagacgagatttcacgatgttggccaggctgatctcgaactcctgacctcagctgatccacccaccttgacctcccaaagcgctgggattacaggtgtgagccaccgcacctggctctaattttcgtattttcagtagagatggggtttcaccaagttggccaggttggtcttgaactgctgacctcaagtgatccacctgcctcggcctcccaaagtgctgggattaaagacataagccaccacgcccagcctcatccaattttctagggcctcctataacccgaaaagcatcaggaacagatacttggctgggcgcagtggctcacgcctgtaatcccaacacttcgggaggccaaggcaggcagatcacgaggtcaggagttcaggaccagcctggccaatgtggtgaaaccctatctctactaaaaatataaaaaattagctaggtgttgtggcgcgcgcctgtaatcccagctactctggcggctgaggcaggagaaacacttgaatctgggaggcggaggttgcagtgagccaagatcttgccactgcactccagcctgggcgacagagtgagactccgtcccccccaaaaaagaacagatactttagggttaaccctgagttggctgagtaggaggattcatgctgaatattcaataaaaattgacagatggtctttcttgtcacttctagttctcgcacagtgaggacaggaaaagtgtttaatctgatacaggacgttcaaggggtatgtggctccatgcttaaattcatccttcacttttgtctaagtacaggatcagaggtaacacttcctggtatttcttgggtgcccgtgttgtcaagcatttaagatcattactttattcagtctttacagttctttcccctttgaaatagggattaatctttcccatttcactgagaaacaagtttagagagatcaagtcatctgaacaacgccaagaggaagaagtgggaatagaactaagatggtctgagtttttatcgagtgttctgtttacttctctctcagataggagattttattttttgagacagggtcttgcactgttgcccaggttggagtgcagtggcgcaatctcggctcaccgcaacctctgcctccccagctcaagcgattctcatgcctcaccctccctagtagctgggattataggtgtgtgccaccatgcgcagctaatttttgtatttttgtagagatgaggttttgccatgttgcccaggctggtctcgagctcctggacttaagtaacctacctgcctcagcctcccaaagtgctgggattacagacgttcaccaccgtgcccagccttgatgggagattttaaaatgcatagtaacagtagaagcaaaccctgttactttgtttacctcatgtaatgtcacaggaaatgtcagtttacttcatgcttaaaatgcatgaagaaaaaatattctgtcagttcaaatt[136 bp omitted]ccccgtctctactagaaatacagaaattagccaggtacggtggcgcatgcctgtaatcccagctatcgggaggctgagtcaggagaactgcttgaacccaggaggcagaggttacagtgaaccaagatcgtgccactgcactccagcctggggcgacagagccaaaaaagatgcataatttcaaaatggtgtcagcattttgaaacaatcttcaagtgactggtttctaacatgttaatattcatcattctctggactttcaaataactaatcatctgtaaacaaatagtaacatgaataggtatgagatgtgatatgaataattaccctgttaattttttttttttttttcctgagatggagtcttgctctgtcacccaggctggagtgccgtggcacaatcttggctcactgcaacctccttctcctgggtttaagccattctcctgcctc[214 bp omitted]tcttttagggacagtgtatctctttattgcccaggatgtagtgcagtgctgagatcatagctcactgcagtctaaaactcctgggctcaagccatccttctgcctcaggctccccagtagttgggactacaggcatgcactaccatgcccagccaatttttatgttttttgtagagatgtggtcttgctatgctgcttaggctggtctcgaactcctggcctcaagaaatcctcctgcctcagcctcccaaagtgttgggattacagacgtgagccaccgcacctggcccaccctgtgaattaaaaaaactgtttatttggacataattatagatttacagcaagttgcaaaaacagtacagggaggtcccaagcccttctgccagcttcccccagcagtcacatctgacatgatcatagtacgaggtcaaaacaggaaaatgacattggtacattccacctacctaattcagatttca[138 bp omitted]ggtgaaaccctgtctctacaaaaaaaatagaaaaaaccagccgggcatggtggcgggcgcctgtagtcccagctactcgggaggctgaggcaggagaatggtgtgaacctgggaggcggagcttgcagtgagccaagattgtgcaactgcactccagcctgggcaacagagcgagactcttgtctcaaaaaaaaaaattatttctatcagctgtttatggttattgatattattaagattttgtgattatctctctaggaccgcctgtattttcatcctacaacaacacgcttgattaaacatccttgcgagaaaaatatagcactatatctagggtaagtggcaattttatgtactgttaccttccttttaaattaaatctttagatttgccccattcattcgttcaacaaacagtaaagaagatggctctgccgtgtgttgctagttgctggcctgtagggagtccatagtcaggggctggaattggaggaagggaaatgaagagatcagccagtaactaaaacaactgcagtatagtgtggtaccacctgtcaaagatgcttggtataagcactgttgggatgcctcaggaaaaaatgcctaggaagtttccactggggagttgatgacaaaactgggttttgaaggatgaataggagttcactgggatggtgggagcaaccagatgtgtatgggcttagagcagagcattcaaaggaataaaaacaccatgcttagcatgcacgtgagttcgtaagggtagcaggttaggaaaccaggtatgtccaccatgccaggatgcttaccctcaccctgagggtagtggaggatgtggggctgcatgactcctgtttgtattcaagacatcagtctggcagcatcaaaaaggggactggaggccaggtgcagtgactcatgcctatagtaccagcactttgggaggccaaggcaggaggatcgctggaggatcgctggaagctaggaattcaagaccagcctgggaatatagcaagatcccagtatctacaaaaaaaaaaaaaaaaatacagaaaattagctgggggtgggccaggcgcagtggctaacctctgtaatcccagcactttgggaggc[134 bp omitted]gaggcaggagaatcacttgaaccc[142 bp omitted]tgcacctgtagtcccagctacttgggaggctgaggtaggaggtttacttgagcacaggagttcgagggggtacagtgagccatgagcacaccattgtaccccgtctggatgtctggatgacagagaccgtctctgtcatcaacagctcttttataaatcagccatgaccaattataaaacataattatggctgggaggctgaggcaggaggatcacttgagcccaggagttgaaaaccagcctggataacatagcaagacccatctctctctctctctctctttttttttttgagacagagtcttgttctgtcacccaggctgcaatgcagtggcgcaatctcggctcactgcaacctccgcctcctgggttccagcaattcttctgcctcagcctcctaagtagctgggactacaggtgtgcaccaccacgcctgactaatttttgtatttttagtaaagacagagtttttaccatgctggccaggctggtctcgaactcctgacctcaggtgatccacccacctgggtctcccaaagtgctgggattacaggcatgagccaccacacctggccatccatctctctctctctctcttttttaaaggctattatgagaaatgccattcatgatggcaacaaaaactttaaaaggaataggaattaactcagtaaatctttttttttttgagacaatgtttcactcttgtcgcccaggctggcgtgcagtggcatgatcttggctcactgcaacctctgcctcccaggttcaggcgattctcctgcctcagcctcccaagtagctgggattacaggtgtgcaccaccatgccaggctaatttttatgtgtgtttttagtagagatggggtttcaacatgttggccaggctggtctcgaactcttgacctcaggtgatctgcctgccttggcttccaaagtgctgggattacaggcatgagccatcacacctggccaactcagtaattcttttctgttgaaaaccataaaatttactggggagttggggaaggagatctggataatgaaatgatataccatgttcatggatggccttttcctatttaaaagtttcccatatgaaggaacaaattgtttatttcttatatacacattcctggtctaaaactatttacgttagtggaactagagccatataaattataaaactgaagtccatcctgccactcaatgtacattttatatagttttatatttgatgtattcacacatttaaactattatttctggaagtcaaacacctggactgtagaggtttatttatgcaaaataagtaaattatatctaaatgactcctggttacaatacaaattttgtttgaatggagacattttagagtacctctattgtcttttttctttccttgtgtgacattatcctaatttaacttatttattgtttatttcaggaaacaagtttttttcacaatggataactttgagactagtctccttccatttaccatccctacatcaatgcaggtagttattttactgagtgatctgaaggatgctagtataagtaatatttgggggaaaatacagttcagaaatatcagactggtctgtttttattagtttagaggtttattttacaatgtacctcttcaagacattaagggcaatttctaagcctaaagaagggctggttttattctgcccctactaccaaaatagactttctattcctgaaaaagaaaaaaagagtggatgtaggtcctcttccttacattggttatattataaatagatagatgggatggtatcttactttatatgcagtaatttcaagacctcccttggtcaggtaagtggctcacacctgtaatcccagcactttgggaggc[134 bp omitted]gaggcaggagaatcactcgaacccaggaggtggaggttgtagtggcctgagatcgaggcactgcactccagcctgggcaacagagggagactctgtcttaaaaaataataataaaataaaataaataaataaataatagataggtgggatggtatcttactttacatgcagtaatttcaagactccctcagtcaggtacagtggctgatgcctgtaatccctgcacattgattggccaagacagga[144 bp omitted]actaaaaatacaaaaaaattagctgggcgtggtggcaggtgcttgtagtcgcagctacttgggaggctgaggcaggagaatggcttgaacttgggaggcggagcttgcagtgagccgagatcgcgccactgcactccaaccccagctattcgggaggctgaggcaggagaatggcatgaacccaggaggcggagcttgtagtgagccgtgatcgcaccactgcactccagcctgggtgacagagcgagactccgtctcaaaaaaaaaaaaaaaaagagccccccaaattgtcctaaaccaaagcacacccttagtgaatatttgagaaattataccatcgacacctatgctaaataaagttttgggctggacatggtggttcacgcctgtaaccccagcactttaagaggctgaggtgggcagattgcttgaccctaggagttcaggactacccagggcaacacaacgaaactccaactctatatgaaattagccgagtgtggtggtgtggtggtgtggtggtgcgtgcctgttgttccagcaactcaggagcctgaggtgggaagattgcttgagccgggagctagaggttgcagtgagctatgattgtgccaccgcactccagcttgagtggcagcttgagactatctcaaaataaataaataaaaataaagttttgtcaattatcgaaaataccaatatttctcctaaaagcgacacttaacagttttttttttttttttttttttttttgagacggagtctcgctctgtcacccaggccggactgcggactgcagtggcgcaatctcggctcactgcaagctccgcttcccgggttcacgccattctcctgcctc[168 bp omitted]caccgcgcccggcctacttaacagttaatgctagtcattcatcatttatactttaggctttgtcatccaagaaggttttgttttgttttgttttgtttgtttatttgattttgtggtttttgttttttgagatggagtctccctctgtcacccaggctggagggcagtggcacgatctcagctcattgcaacctccacctcctgggttcaagcgattctcctgcctcagcctcctgagtagctggaattacccccaaaattagccaccacgcctggctaatttttgtattttttagtagagacagtgtttcactatgttggccagactggtctcaaactcctgacctcaggtgatccgtcttgttctcccagagtgctaggattacaggcatgagccaccacgcccagcttcagggaaggtttttataaaggaagaggagatggaatgaattgaggtatctcagggcacccaagaccagcttcaacttggttctagctggccccaagatacacagttctcagtatctaagaaccaaccaactattgctggcatacatggtgttttttgtttgtttgtttttgttttttttgagacggagtctcactctgtcgcctaggctggagtgcagtggcgtgatctcagctcactgcaacctccacctcccgagttcacaccattctcctccctc[135 bp omitted]gtttttggtttttgagaccgagtctctgtcacccaggctggagtgcagtggtgcaatctcggctcactgcaacctctgcctcctgggttcaagcgattctcgtgcctcagactcctgagtaactgggattacaggcaggcaccaccatgcctagctaatttttttgtatttttagtagagatggggttttgttatgttggccagctggtattgaactcttaaccttgagtgatccgcctgccttggcttcctgaagtgttggtattacaggcgtgagccaccatgctcggccataaatgttttttttcttttctttctttttcttttttttttcaagacggagtttcacccttgttgcccaagctgtagtgcaatctcggctcaccgcaacctccacctcctgggttcaagcaattctcctgtctcagcctcccgagtagctgggactataggcacctgccaccatactcagctaatttttgtatttttaatagaggcagggtttcaccatgttggccaggctggtcttgaaatcctcacctcaggtgattcacctgccttggcctcccaaaatgctgggattataggtgtaagccactgcgcctggtctctttctttttctttttctttctttctttctttctttctttcctttctttctttcttccttccttccctccttccttccttccctccctctctgcctccttccttcctttcttctccttccttccttccttccttcctcctttctttctttctttctctctctctctatttcttttctttctttctttcccagagttttgctcttgtcaccaggctggagtgacccagtctcagctcactgcaacctccacctcctaggatcaagcgattctcctgcctcagcctctcaagtagctcggattacaggcacctgctgccacaactggctaattttcgtatttttagtagagacggggtttcactatgttggccaggctggtctcaaactcctgacctcggtgatctacccgccttggcctcccaaagtgctgggattacaagcgagggccaccgcgcccgtccatacattttttttttttcaatgcatgtctagaagtctgcgtttctgaatcaatgtttgaaaagatgctctcattgatatcatccatatgataacttttaggtcggcgtaccagaagtgacatcagcacattttgctggttcgttattgctgttagtagtggatcaaaaagtctatatttatgattatgaaaataattcttggagcatgtctttaggtatgtacattttgtatttttaaattttgtttgagtgtagtcaacatgagagaagagggtattagtgttggaagtataagcgatgctcctacttggatgtcaaccccaggacattactttgtcctttccaaccaaaatgaaaattggcctgagtccccatccgtagactgggaacctagtgttcccatcatggattgtagtcacaagccacaaaagctacttgggcttattgaaacaaacaagaggcattggccgggtgcgctggctcacgcctgtgatcccagcaatttgggagtctgcggtaggcagatcatctgaggtcaggagttcgagaccagcctgaccaa[134 bp omitted]aacatggggaaaccccgtccctactaaaaatacaaaattagctgggcgtggtggtgcatgcctgtaatcccagctactcgggaggctgaggcaggagaatcgcttgaacctgggaggtggaggttgcggtgagccgagattgtgccactgcattccagcctgggcaacaagagcaaaactctgtctcaaaaaaaaaaaaattagctgggtgtggtggtgtgtgcctgtaatcccagcttactctggagcccgaggcaggaggatcccttgagcccaggaagtggaggttgcagtgagctgagattgggccactgcaccccagcctggatgacagagtgagactctgtctaaaaaaaaaaaaaaatcgagggacatcagcgggtcttggtgatggactggtgtccggggaggaccagggaaaactgaggatgaccagtagatgtctggtaaccaagctggattatgagcattgtccctcccacacacttctcacgagggctaggggacggtagagaaggtgagctttatgaagagggagaaagatgaggactctgatgcaggaggaaagaggatgtgaaaagtgaagatgaggcaaatgttagctttagaaaagaagaggatcgcctgagcccaggagttcaagtccaccctaggcaacagagcagaatgccatctttacaaaaaaccttacttttctttttctggagacagagtctcactcggtcacccaggctggagtacagtggcccagtcttggctcactgcaacctctgcctcctgggttcaagcgattctcctgccttagcttcctgagtagctggggtcacaggcacccgccaccacgcctggctaattttttgtttgttagtttgttttgagatggagtttcgctgttgttgcccaggctggagtgcgatcgcacgatctcagctcattgcaccctctgcctctcgggttcaagcgattctcctgccttaccctcccgagtagctgggattacaggcatgtgccaccacgcccagctaattttttttttttttttgacggagtctcgctctgtcactaggatggagtgcagtggcacaatctcggctcactgcaacctccacctcccaggttcaagtgatcctcctgcctcagcctcccgagtagctaggactacaggcgtgtgccaccacacccagctaatttttgtatgtttttagtatagatggggttc[142 bp omitted]gtcacccaggctggatggcgtgcagtggcgcgatctcggctcactgcaagctccgcctcctgggttcatgccattcttctgcctcagcctcttgagtagctgggactacaggcacctgccaccatgcctagctaattttttgtatttttagtagagatggggtttcacggtgttagccaggatggtcttgatctgacctcatgatccgcccgcttcagcctcccaaagtgctgggattacaggcataagccactgtgcccggcctaattttgtatttttaatagagacagggtttctccattttggccaggctggtcttgaactcccgacctcaggagatccgcccacctctgcctcccaaagtgctaggattacaggtgtgaaccaccgagtcgggccaactgggggcagttctgtcccccaagaggacacttggcaatgtctggagacatttttggtgtcaagactagaggaaggtgctactggcattgagtggtgggtagagatacagatgctaaaaagcatcctacaatgcataggaaactcctcgcaagtgagaaccatctgctcccaaatttcagtagtgttgagg[144 bp omitted]tctactaaaaatgcaaaaattagccaggcatggtggtgggcacctgtaattccagcttgagaggctgaggcaggagaatcgtttgaacctgggaggtggaggtggcagtgagccaccactgcactctagcctagacgacagagattgcaccactggcactccagcctggatgacagagggggactct[142 bp omitted]aaaccctgtctctactaaaaatacaaaaaattagccgggcgtggtggtgggtgcctgtagtcccagctactcaggaggctgaggcaggagaatggcatgaacccgggaggtggagcttgcagtgagccaggatcacgccactgcacttcagcctgggcgacagagcaagactctgtctcaaaaacaaaacaaaaaacaaaaaacttttctccaaacttcagggaactcataaacatttcaaaattatattttcctttcaggtataaaacaccctgttacacatgtctctggtgataattgttgttatactggaagtttgttttgtgtggtaagtataagtgtataattgttcatttttttttgctctcctct[132 bp omitted]gaaaccccatctctacaaaacaataaaataattagcttggtgtggtgacatgtgcctgtagtcccagccacagcaggaggattgcttgagcccaggagatcgaggctgcaatgagccgtgattacaccactgcactccagcctgggcaactagcaagactctgtcaaaaaaaaaaaaaaaaaaaaagactgggcatggtggctcatgcctgtagtaatctagcattttgggaggccgaggtggaatcacctgaggccaggagctcgagaccagcctggccaacatggcaaaaccctgtctctactaaaaatacaaaaaattagccaggcatggtggcgtgtgcctgtaatcccagctactcaggaggctgaggcaggagaatcccttgagcctgggaggcggaggctgcagcgagctgagattgcaccattgcactccagcctgggcaacaagagtgaaactccatctcaaaaaaaaaaaaaagaaaaaagataaagaaataaggacagtgtaaggcttgagactgggtctcaagaacttggtcagtgttatttcccatgggctcagagcacagttgggagatggaaaaggttttggggacgttttcagatccaccggctgacactataaatacatccatctatagttgacctttgaacaacgtataggttagaggtaccaccctccaccccacacagttgaaaatccacaggtaactttcgacttccccaaaacttaattactgtccaggcgtggtggttcatgcctgtaatcccagcagtttgggaggctg[133 bp omitted]gctaatatgggcaacatggtgagaccttgtctctactcaaaatacaaaaaaaaaaaaaaaaaagaaaagaaaaaaatagctagatatggtggtgagcacctatagtcccagttactcaggtcgctggggtgggaggatggcttgagcccagaaggcgcaggttatagtgagctgagatcatgccactgcactcggctggggcaatagagccagaacttgtctcgaaacaaaaacaaaccaaaaaacaaacttaattactaatagcctactgttgcctggaagcctcactaataacataaacagtctatgactgtcacccagggtagagtgcagtggcgcaatctcggctcattgcaacctccgcctcccaggcttcagtgattcccctggctcagcctcctgagtagctgggactacaggtacacagcaccacgcctggctaatttttagtacaggtggggtttcaccatg[135 bp omitted]gacagggtttcattatgttggtcaggctggtcttgaactcctggcgtcaactgatccgcccgcctcagcctcccaaagtgctgggattacagttgtgagccaccacgcccagcctaactttggtattttttaggagagatggggtttcattatgttggccaag[137 bp omitted]cagacatccaggtttttttcagtcatgagttttcatttctctgggataaacgttcaggaacgtacttgctggcatctttctttcattctttctttcttttttttttttatagcatgtcagtaatttggtttttgcatatttccgtggagatcagatatcccagacttatatatattattcaaatactgggggattcagtttttggaagtatcactatgacagacaggtatgttaaatttggtaagaatgtgaaaataaatacatatgtaccttgtgattgtagtaattgctgtcaatgggtgcgtgagggtgttttcctctttaagagtccaactgggacaggagtggtggctcatgcctgtaatcccagcactttgggaggctgaggcaggaggatagcttgagcccaggagtttgagaccggcctgggtgacatggcaagaccccatctctacaaaaaataaaaaaaataaataaattagtcaggtgtggtggcgtgtgttttagtcctagctacttggaaggctgaggtgggagggtcactggagtctgggagattgaggctgtggtgactatgatcacagctctgctctccagcttgagtgacagagcgagacctcatctcaaaaaaaaaaaaaaagtccactggctgggaggttagggaaaattccaggtcaatggagccagctcaggagcctaggaagttagagacaaaaagttttaggtcaggcaaaatcatggcaccatttatgccatttaagtagtacttataaaaagctagtgacaggccaggtgcggtgcctcacgcatgtaatctgagcactttgggaggccgaggtgggcagatcacctgaggttgggagttcaagaccagcctgactaacatggagaaaccccgtctctactaaaagtacaaaatgggctgggcgtggtggcacatgcttgtaatctcagctactcgggaggctgaggcaggagaatcgcttgaacccgggaggcagaggttgcggtgagccaagatcacaccattgcactccagcctgggcaacaagagcaaaacagtgtctcaaaaaaataaaataaaataaaataagctgggcgcagtggctcacgcctgtaattccagcaatttgggaggccgaggtgggtggatcacctgaggtcaggagttcgagaccagcctgaccaacatggagaaaccccatctctactaaaaatacaaaattagctgggcgtggtgcctcatgcctgtaatcccagctacccgggaggctgaggccggagaatcacttgaacccaggaggcggaggttgcagtgagccgagatcgcaccagtgcactccagcctgggcaacaagagcgaaactccatctcaaaataaataaataaaataaaatacaaaaactggctgggtgtattggcggacgcctgtaatcccagctatcgggaggctgaggcaggagaatcgcttgaacccgggaggcagaagttgcttgagccaagattgcggcactgcactccagcctgggcaacagagaaactccgtctcaaaaaaaaaaaaaaaaaaaaaaaagctagcgcccagccgtgtagggacatggtggctcacacttgtaaccccagcactttgggaggctgaagcaggtggatcgcttgagtccagtagttaaataccagcctgggcaatacggggaaaccctgtctctaccaaaaatataacaattagccgggcatggtggtgcatgcctgtagtctcagctacttgggaggctgaggcaggaggattgtttgagcctgggatgtggaggttgcagtgagctgagacaacgccattgcactgcagtctggatgacagagtgagaccctgtcttaaaaaaaagaaaagaaaagaaaaaagctaatgccctagtaaaggcaacacattaacttatgacacacccacatgcccacctgaagattggtactatcaggttcatcatcatgctcactttacagatgagaaaactgtagcgggttgaaccaatgtccccccaaaatttatgtcaacctggaacttcagactctaactgtctttggcatttttgctgctgtaacaaaatatctgagaccgagtaatttataaggaacagaagtttacttgtcatggttctggaggttgggaagtccaagatcaagacgccagcaaggttgttttctggtgaaggctgcaatctgctcccaagatggtgcctatgttggggggtcctctggaggggcaagagccacgtcctcacacagcagaaggcagaagaaccaacgaacagtgctctcttcaacgtagagctcttttataaggatgctcatcccaaagaccatacattgatagtacattggggatttcagcatgaattttggaggggaaaccatcattcaaaccatagcaggaaactgacttggaagtagggcctttgcagatgtaatcagttaagctagaatgaggtcacattgaaatcaggtggccttcaaatcaaatgaccgctgtccaggcgcggtgcctcagcctgtaatcccagcactttgggatgctgaaggcgggggggggggggtggtgtggatcacttgaggtcaggagttcaagaccagccaagccaacttggtgaaaccccgtctctactgaaaaatgcaaaaattagctgggtgtggcggctggcgtgcctgtaatcccagctacttgggaggctgaggcaggcgagtcacttgaacttgggaggtggaggaggttgcagtaagcccagatcgtgccactgcactccagcctgggtgacagagtgaaactctgtctcaaggaaaaaaaaaaagaacaaacaaaaaaaacaaaaaaggaaacctagcatcactaaaattcccaattattactaaaatagcgtttgtgtgtgcgtgtgtgcgcgtgtgtacgtgtgtgaacgtgtgtgtgcgtgtgtgtatgtatgtgaacgtgtgtgcgtgtacatgtgtgcatgtgtgtacatgtgtgtgcgtgtgtgtacgtatgtgaatgtgtgtgggtgtgcgtgtgcatgtgtgtacgtgtgtgtgcgtgtgtacgtatgtgaatgtgtgtgtgggtgtgcgtgtgcatgtgtgtacatgtgtgtgtgtgcatgtatgtttgtgcgtgtggcagtggaattgtttttatcacggacatttcaagaggagaggttaccgcagagaatagttgagctctcagcactgctacagccaggacaagagtcagc[131 bp omitted]tgagacccaccccccaccatatctacaaaaaattgaaaaagaaatgagctgggaatggtggtaggtacctgtggtcccagctactcagggggctggaggattgcttgagcctgggagactgacgctacagtggggtgtgatcgtgccactgcactctagcctgggggacggagagatatcctgttgcaaaaaaagaaaaagaaaagaaactggttggagtgatggagcaggatctagagtcccttccaggggcagatggatcccataattgcctaatgggataggtggagggagggtcttgaaggcaggtagaataatagacccccaaaggtgtccacatcctaattcctggaacctgtgaatatggttcctgacatggcaa[134 bp omitted]atggtgaaacctcatctctactaaaaatacagaaaattagccaggtgtggtggcaggcgcctgtaatcccagctactcgggaggctgaggcaggagaatcgattgaacccaggaggcggaggttgcagtgagctgagatcacaccattgcactccagcctgggcgacaagagtgtaactctgtctcaaaaacaaacaaggccaggcactgtggctgatggctgtaatcccagcactttgggaggccgaggtgggcggatcacctgaggtcaggagtttgagaccagcctggccaacatggcgaaaccccgtttctactaaaaaaacagaaattagccaaatatggtggcaggtgcctgtagtcccagctacttgagatggggaggcagggaggattgcttgaacccaggagacagaggttgcagtgagccgaggctgtgccactgcactccagcctgggcaacagagtgagactccatctcaaaaaaagaaaaaaagaaaaaagatagcagtcttagtctctctgtctctgtctctctctctctctcttcctctctctctctcttcctctctctctctctctctctctctgtctctgtctctgtctctgtctctgcaagatgtgggaggtagccagctgggctgctatggaaatctgtctcactatccctaggtggggcccttgattcctgttccaagtcagctgctagacactttgctgtccagctaacaatcaggaatgaggactcccaggcaggaatgaaagactcaggcagccttctagcagtctgggtcatatcattttctccaaacacccaaaccaaagctgtcttctttcaagtttttgccccaagtgtcacatttcttttcttttcttttttgagacaaggtctcactctgtcacccatgctggagggcagtggcatgattgtggctcactgcaacctctgcctcccgggttcaagtgattctcctgcctcagcctcctgagtagctgggattacaggcgcctaccaccacacccggctaatttttgtatttttagtagagatggggtttcaccatgttgaccaggctggtctcgaactgctgacctcaggtgatccacccgcctcagccacccaaagtgctgggatgacaggcgtgaaccaccgcacccaattgagtgccatatttccacagagggcattatttgtttttctaaaaaagactttccttcattgtaacttattagataatctgaagttaaaccgacaaacacatgtgtattaagatttattcatctgaagtcttttctgtttgtttcataggcagaaatcattgggtctttaggcggaatcttccactttttttctttgtcacaggttgcgatgcttgtagtgaatcaagggaaggtaagtaactgcagagggaagaactactcagaggacctttgcccaagcccaggtttttgttacaactcgcacatttttaaacatttatttatttatttaatttttttttagacagagtctcgctctgtcagccaggccggagtgcagtggcgcaatctcagctcactgcaacctccacctttcaacttcaagcaattctcctgcctcagcctcccgagtagctgggactatgggctcgtgccaccgcgcctggctaatttttgtatttttagtagagatagggtttcaccatgttggccaggctggtctcgaactcctgagctcaagtgatccacccaccttggcctcccaaaggcctgggattacaggtgtaagccacggcgcccggcatcgataatgtatttttgtttaaccattttaaaatagtatcttttctttttttatttatgtgagactgattctcactgtgtcacccaggctggagtgcagtggtgtaatctgggctcactgcaacctctgcctcccgggctcaagtgattcttgtgcttcagcctcctgaatagctgggattacaggtgcctgccaccatgcccaggtaatttttgtattttcagtagtgacagggtttcaccatattggccaggctggtctcaaactcctgacctcaagtaacccccaccctccgccgccgcggcctcccccagtgctgagattacaggtgtgagccactgcgcctggcccaatggtaccatttcagtatgtaatcaatataaacaactcatggatgagatagtttacatttttctgtactacatcttcaaaatgaggccgggtgcagtggctcacgcctgtaatcctagcactttggaagtccgaggcgggcagatcatttggggtcaggagtttgaaaccagcctggccaagatggtgaaaccccgtctctgctaaaaacacaaaaaaattagcccggcacggtgtcaggcacctgtaatcacagctacttgggaggctgaggcaggagaatcacttggacctgggagatggaggtggcagtgagccgagatcgtgccactgcactccagcctgggcaacagagccagactccacctcaaaaataaaataaaataaaataaaataaatcttcaaaatgcattgtgcatttgacacttagagtaattctctattcagaactaaattttcaatggttaaactgaaatgtaaccctagcaaaacaataaagttgtatttaataaaaataaaaaaagaaaggcagacttgtggcttctttgctttctttgctttcccctgcacctgctagccagactcctcttccctcattaggactcagtgggactccacagtagggtttggggagaggctgaatggtgtctttttctcccagggcatgttcaagtactcagatcaccccctcaaccggagtttcgggctgtcttttgactataatgggactctagacatcctcatcgcccccggccagagaggcatcctgctcctatggtttgagaacagcctgttgttttcccataatgcaggtgagcccaggggcccagggtggggctgccgcctggtggcctcctccagaggggccgagtacagcctggataaggggaggggaaggagcaacccctcgaccactcggttattttttctcttccatgttcagagtggaccacaagcccataatcatttagtggatctctctgcatcctccctagcttcctggcttgcaggatacttagggccaggtagacagtgacaactgaaataagtgacggtgacaagagtctccgtcatggaggtttattccgccagctttaggtcgcgtctgggaaaaacgccagtcagacaactctgaggctgcttttccagagttccaggaggcttcgtatttaacatttctttctcttttttttttgagacggagtctcactctgtcgcccaggctagagtgcagtggcgcgatcttggcccactgcaagctccgcctcccgggttcacaccattctctggcttcagc[224 bp omitted]ggagactttagttcatgcacagtaaagttcctgtttttcttttttttttggagacagtgtctcactctgtggaggcggaagctgtgccgagtcctgattgtacttctgcacccaggctggaatgcagtggtgcaatcatggctcactgcagcctccaccttccctgggctcaaacgatcctcccatctcagcctcccaagtagctggctacaggcatgtgccaccatgcctggctgatttttttgtattttttgtagagactgggtcctcctgtgttgcccaggctggtctcaaactcctggcttcaagcaatcctcctgccttggcctcccgaagtctggatattacagctctgagccgctgtactcaacctgttttatcctcacaatggtttccctttttttttttttttttttttgggacacagtttcactctgtcatcgagactggagtgcaatggtgcaatcgtggctcactgcagcctccccacctctcaggctcaagtgatcctcctgcttcagcctcccagtaactgggactacaggtgcgccaccatgcataactaacttattttttgtagagacggggtttcaccctgttgcccgggctggtctcaaactcctgggttcaagcaatcctctggcctcagcctcccaaagttctgggattacagatgagagccaccaaacccggcctgttttattccttatagtggtcacctgtattagaagacattccattgtgttcaagcccctggttgacaaaaaactcaatggccatccctctgagcttgcttatagagaagattaacggggatctggttttcttttttcttttcttttttttttttttttttttgagatggagtctggctctgtcgcccaggctggagtacagtggcgcaatctcggctcactgcaacctccacctctgggttcaagcaattctcctgcctcagtctcccaagtagctgggattacaggtgcgtgcaaccatgctcagttaatttttgtatttttagtagagacaaggttttgccatgttggccagcctgatctcgaactcctgacttcaagcgatctgcccacctcagcctcccaaagtactgggattacaggtgtgcacccccgcgcctggcagaagggttaggttttcttaaaccgaagcatattccttgtcatgcttaacaaaattgtgtttcagtgctgtattctccttgattcattctcctttgaatagcaaacctctcaaaagctataaggaacatcgaaagagccactggccgggtgggttgggtggtggcaggggtggctgtggtcccagtagtagacatcccctttcccaggatgtacacggggcctcatgcacctgtcctgttacctcctaggtcagctcgtcgacaccgtccgggtgaaaaaaggagaccagaccttgttttcttccatttttgaagccaagatcaccatccacaacattgctgtcagtgcgtagccgacccactgctagccaagaaatatttagacctggcttattaaccgtaggcctgccagacccaa[134 bp omitted]tctactaaaaatacaaaaataagctgggcgtggtggtgggcgactataatcccagctactcaggaggctgaggcaggagaatcgctggaacccgggaggtggagtgagcagtgagcagatcgcaccatggcactccagcctgggcgacacagtgagactccaaaaaaaaaaaaaaaaaaagcttcaactctgtatttttttcatattgcttggcatttccacatgaattttgtgattataaccagaaaatagctgtcatattattcttttttttttttttttttttgagatggagtttcaatcttgttacccaggctggagtagtggcgtgatctctgctcagtgtaacctctgcctcctgggttaaatgattctcctgcctcagcctcctgagtagctgggactacaggcgcgcaccaccatgcccggctcatttttgtatttttagtagaaaaagaggattcaccatgttggccaggctggtctcaaactcctggcctcaagtgatccacccccctcggcctctcaaagtgttggaattacaggcgtgagccactgcacccaaccacacttatgtttttgtccacagaaatgaccagcatttcaatttttgttttgtcttgttttgtttttcccagctgaaaatgaactggcagttataactcgggaggataatttgtattatggcaatctgggcatcgtgccaagttccataatcaaagtaggtaaaaagaaagtggggttatgggctgggcacggtggttcacgcctgtcatcccagcactttgggaggctgaggtggaaggatcacctgaggtcaggagttcaagaccagccttgccaacatggtgaaaccctgtctctactaaaaatacaaaaattagccgagcctggtggtgggcacctgtaattccagttacacgggaggctgaggcaggagaatcgcttgagcctggaaggcagagtaagactctgtctcaacaacaacaacgacaacagaaagtggggttatgaattagttggtaaggaataatggtcttgttcacaaacttctgaaccttttttcgaaggctagaaatcactctagttagtaaaacaacaacaacaacagcagctaaaaggggaagagtatttaaaatactataggtgctggtctaggcaccttcgtgtattacattatttaaccttgaccatcatcttaggaagctcctcatatcgtccctatttgacagatggaaaaactgaggcacagagacctaagtcgtctgtccaggctcaaagtggtactaagtggtggtgcaggtgtcatctgacatcctcttgtgcattatgcctatctaattttttttttttttttttgagatggagtctcactctgtcgcctagcttggaatgccacagcacaatcttggctcactacaacctccacctctcaggttcaagcaattctcctgcctcagcctcccgagtagctgggattacaggcgcatgccaccacaccaggctaagttttgtaattttagtggagtcagggtttcaccatattgtccaggctggtcttcaactcctgacctcaggtgatccacccgcctaggcctcccaaagtgctgggattacagtcgtgagccaccgcgcccggccgaaactctgtttcttaaaaataataataaaactaacaaaaatttaaaataaaagaattattttggccgggcgtggtggctcacgcctgtaatcccagcaccttgggtggccaaggtgggcggatcacgagttcaggagatcgtgaccatcctggctaacacggtgaaaccccgtctctactaaaaaaaatacgaaaaaattagccgggcgtggtggcggcacctgtagtcccagctactcgggaggctgaggcaggagaatggcgtgaatccaggaggcg[140 bp omitted]tggttccaggagttcatgaccagcatgggcaacatagtgagaccccgtctctactaaaaatatgaaaattagctgggcatggtggtgcatgcctgtaatcccagctactcgtgaggcaggagaatggcttgaacccgggagacggaggttgcagtgagccgagatcgtgccactgcactccagcctgggcgacagagtgaggctccatctcaaaaaaagaaaaaaataataattaccaaaggatgaatgaagctgaagagaagttagatcacaagttgtccttatgactgtgtttcctccctcccccagccctctctcccttctttcctttcttccttcctttctctttctctcttcctttctcttttctttttctttcttccctctaccttctttcaatctgcatcatggccgggcgtggtggctcatgcctgtaatcccagcacttttgggaggccgaggcaggtggatcacgaggtcaggagttcaagaccagcctgatcaacatggtgaaactcgtctctactaaaaatacaaaaattagccgggcatggtggtgcgactgtgatcccagtgactcaggagaatcgcttgaacccgggaggcggaggttgccgtgggctgagattgcgccactgcactccagcccaggcgacagaacaagattccgtctcaaa[132 bp omitted]gctaacacagtgaaaccctgtccctactaaaaaatacaaagaaaaaaaaaattagccgggtgtggtggctgcgcgtctgtagtcccagctactcgggaggctgaggcaggagaatggcgtgaacccgggaggcggagcttgcagtgaaccgagatggcgccactgcactccagcctgggagacagagtgagactccatcaaaaaaaaaaaaaaaaaaaaaaaaaaaaaaaaaaaaatctgcatcatgaaataaaatttaaacctccagaaaaacaattacaatgattagatctcaggaatcattttcttcttagtttgcagaccaatacatctggtcagaagacgtggccctgatgttcaggagcccagggactctggaaatactgaccccactgcgtgacacagcctttccagcttttgatttccagaagtgcctcgtgaatatccaggcgcttctcatggaccctgaactccacgttggaaagtgcaaggtatgtgatcctaactgttttgatcaatgttcaatgtagtttttaaagacaaattcaacctgggcatggtggtgcacgcctgtagccccagttgctcaggaggctgaggctggagggttgtttgaggccaggagttcaagaccagcctgggcaacatacacccatttctaaaacaaaaaaaaatttttttttaaagctgggcgttggccaggtacggtgggagactttggagactgagtctttgggagactgaggcaggtggatcacttgaggtcaggagttccagaccagcctggccaacatggtgacaccccatctctactaaaaatacgaaaattagcttggtgtggtggcgggcgcctgtaatcccacctacttcgagtgctgaggcatgagaatctctttaacctgggaggcagaggttgcaatgagccgagatcacaccactgcactccagcctgggtgacagagcgagacttcgtctcaaataataaataaataaataaataagttgggcatggtggtgtgtactctcagttacttgggaggctgaggtgtggggatcacttgagcccaggagttcgaggctgcagtgagctatgatggagtcactgcactccagcctgggtgacaaaatgagatcctcgtttctaaaacactaatttaaaaaaagagaaattaacaaaataagagacaacaagatagtattcgtcaccaataagagatcaatcacatcacccattgaccactgccaacacgatcaaactcaatctcatgaggcaagcatcaatccagctgcaaatttgccagaaatacaaaagacagaggaatgggttcacctgcaccagggaaatccagattttgagaaatgctgcgggcccaacagcgtggggacttccaaaatccatggaaaggaaaagggggccgggcgtggtggctcattcctgtaatcctaacactttgggaggccgaggcgggcggatcacctgaggtcaggggttcgagagcagcctggccaacatggcgaaaccccgtctctactaaaaatacaaaaattagatgggcgtgctggcacatgcttgtaatcccagctactcaggaggctgaggcaggagaatcgcttgaacctgggaggcagaggttgcagtgagccgaaaccaagccactgcactccagcctgggtgatggagtgagactccatgtcaaaaaaaaaaaaaaaaagtagattttgtagagacaggagtctccctgtgtggtccaggttggtctcaaacccctgaacttaagtgattctctacccctcaggattacaggtgtgagccactaaacccagccaacaaacctgtagattgaaagaggattaaaagacatacctgtgttgggaaacgggcaagactgagtgatgatcttcagatgcatactagggcagctctactctaaagaaacagaaagagggggcgggcgcggtggctcacgcctgtaatcccagcgctttgggaggctaaggtgggtggatcacaaggtcaggagatcgagaccttcctggctaacagtgaaaccccatctctaccaaaaatacaaaaaaaaaattagctgggcgtggtggtgggcgcctatagtctcagctacttgggagactgaggcaggagaatggcatgaaccccggaggcagagcttgcagtgagccgagattacgccactgcaccccaacctgggcgacagagccagactctgtctcaaaaaaaaaaaaagaaacagaaagaggtcaggcgcagtggctcacaactgtaacctcaagcactttgggaggccgagatgggaggatcacttgtgcccaggaatttgggaccagcgtggcaacatagtaagcccttgtctctattaaaaaaaaaaaattgaattagccgggcatggtggtgcacgcctgtagtcctggctacttgggaggctgagggaa[134 bp omitted]gtcagggttggggaatacttctggagaggagggaggggctggcattgtgcccatctcgagacccttctggaaatacagagtctagtggggaagacagaggcacaagtggagattcaggctgcaggaccaggagggtcccttcctccttcccacctccttgccctttctttatgggaacaggagcatgattatctttcttcttcgcctttttaactagatagagtttctgacaggagaatttatatacaggatgtataccattgacatgcacagccagctggaattgactgcttcgttgataccccagccaggcacatccctgattcctctggtaagtacatcttaatgtttctgctatctgggattctcagccacatgcctggtgcccactcccagattctggaaatcccctggcatcccccacaagga[131 bp omitted]tgcagcctccacctcctgggctcaagcaattctcctgcctcagcctcccgagtagctgggattaccagcatgtgccaccacgcctggctaattttgtatttttagtggagacggggttcccccatgttggtcaggctggtcttgaactcctggtctcaagtgatctgctcacctcggactcccaaaatgttggggttacaggcatgagccaccatgcccagccatttctatgtgtcttccccctcgacgtgcctctgcatgtctgggcgtgatgaggctgtggctgtccagctggccgcctggccgcccttgtgctgtctctgtgcctcctccatccttctgagctgcccatacattcattttcttcttcttctttttttttttttttgagacagagttttgctctgtcgcccaggctggagtgcaatggcacgatctcggctcactgtaacctctgcctcccgggttcaagccattctcctgcctcagcctcccaagtagctgggattacaggtgcctgccatcatgcctggctaagttttgtatttttagtaagatggggttttgccatgtt[135 bp omitted]agctaagagccctgacccctatggccttcccccacccagcaggaagtgtttggatgtttctcgatccaaaatccaagtgtctaagcctaggcattagctgcaagtacagatggtcccacaattttttgactttacaatggcacaaaaccgattatactcagactattgagtattatactcaatatattatactcaaaatattgagtatacaaaaactattatactcaatagaaactgtatttccagtactgatacagcctttctgtttttcactattagtatagtattcaataaattacatgagggccgggcgcggtggctcccgcccgtaatttcagtacttcaggaggctgaggtgggaagatcgcttgaacccaggagctcgagactagcctgggcaacatagtgagactccatctgtacaaaaaacataaaaattattagccgggtgtggtggcgcatgcctgtaatcccagctactggagaggctgaggcaggagaatctcttgaacccaggaggcggaggttgcggtgagccaagatcgtgccattgcactccagcctgggcaacaagagcgagactctgtctcaataaataaataaataaataaataaaaataaattaaaaaaataaaaattagccaggtgtagtggcatgcacctgtagtcccagctacttggggctaaggcaggaggctgaggcaggaggatcacttgagcccaggaggttgaggctgcagtgagctatactcatgccattgcactccagcctg[140 bp omitted]atagtgaaaccccatttctactaaaaatacaaaaattagccgggtgtggtggcacatgcctgtaatccccgctactcaggaggctgacgtgggagaatcacttgaatctgggaggtggaggttgcagtgagctgagaccatgccactgcactctagcctgggtgacagagtgagactccctctcaaagaaaaaaaaaaattaaataaataaataaaaataaaaaatttaaaagtaggtaaattattgcttcatgaggacagagtttccatttgggactatgcgaaagttttggaaacagatggcagtgatggttgcacgatattgtgaatctaccgaaagccactgaattatacactaaaggtgggtaaattcatccacatgtattatctatttgtacaaacattcaggaaagctggacccctgaaatgtcaacatcgtgatccaaggggtggaagggcgagtgggttttgttctccttttagtattgcttggtttattctcaatttaaagtaggctgggctaacttccaatgcttg[131 bp omitted]tgaaacctcgtctctactaaaaacacaaaaattagctgggtgtggtagcgtgcttggaatcccagctactcgggaggctgacacatgagaatcgcttgaacccaggaggcagaggttgcagtgagccaagatctcaccactgcactgcagcct[140 bp omitted]tggccaatatggtgaaaccccatctctgctaaaaatacaaaaattagctgggtgtgttggcgcatgcctgtaatcccaactacttgggaggctgaagtaagagaatcactggaacccaggaggcagaggttgcagtgagctgagtttgcaggactgcactccagcctgggtgacagagtgagactccatctcaaaaataaagaaagaaagaaaataataaataaatgcattttcaacttctttttttttttttttttgagacggaatcttgctcttgttacccaggcgggagtacaatggcgtgatctcagctcaccgcaacttttgcctcctgggttcaagcgattctcttgcctcgggctcccgagtagctgggattacaggcatgcaccaccatgcctggctaattttgtatttttagtagagatggggtttctccatgttggtcaggctggtctcaaactcccgacctcaggtgatccacctgcctcggcctcccaaagtgctggaagtacaggcgtgagccaccgcgcctggccaaattttttttttttttttttttttgtagagacaggatctctctgtgttgcccaggctcgtcttgaactcctgggctcaagcagtcttctcaccttggtctcccaaagtgctgggattacagatatgagccactacacccagccctgatttttcatttgaaggtgtgctgggctcactgtgggggtttgtcaccccgtcctgcctgctggctccgtacagcctgagcttctctcccccactcccaggtgatggtgagcaacccccactccctggggttccaggccaccttctacgagaacggttacacatcagatgggaacaccaagtacaaactggtgagccgcgtccccaccaaaccctgtcgcctgtcccttgagaggccccctcttcctccttcccttatcagcataaaaatttaggagtttccagggtacatagcccgtggccgtgccccgcggtgggaagatgatcaggcagccgtcaaccacacgcttgacctcattaaagtgtcacacgggagagacccggatggcatgacagggaggagcctaacccagcccggggagggtagccggagatctgagttagttgggtaaactgaggcatgaggattgcgtgggggcagtttccacagggcaggggcctgaccaggtgcaagttggtgacagcaaactcctttaaccaggctcgtcacatcacatccaggtgagtgagaaaacagtcactcctcactgtgggtccccagaactcagggagcaagggaataggagccatcatattggggccgttgtttctgtgagcttccagaagcctttcacaggcggtgggactagaacagagcagggcttggctgggcgcagtggctcacgcctggaatcccagcactttgagaggcca[137 bp omitted]actcgggaggctgaggcagg[135 bp omitted]ggtaacgctcacctgtagttccagctacttgggaggatgaggcaggagaatcacttgaaccagggaggtggaggttgcagtgagccaagatcgtgctaatgcactccagcctgggcaacagagagagactccatctcaaaaaaaaaaaaaaaaaaaaaaaggaacagagtggggctaagcggcttccaggttcgtccccccatgtcccctccaacaccccatctctcccaatgtcctgagttggggatgcccatggtgttccacggatacacttgggattttctctcttgaccccacaggatattttcctaaaacagcagcagcactggggcaggaccgactccaacttcacttccaggtatgttgtctcctgggagaggcggggactgggctgcctacaggggtttccttagcaggagcgaagagaagcaggtctgagatcagacccccagctccagaacagtaaaacaaggcgattacaacactttacaagagctgggcgcggtggctcacgcctgcaatcccagtactttgggaggcagaggtgggtggatcacctgaggtcaggagttcgaaaccagcctagccaacacggtgaaaccccgtctctactaaaaaataaaaaaaaattagctaggcgtagtggcaggcacctgtaatttcagctactcgggaggctgaggcaggagaattgcttgaatccaggaggcagagggtgcagtgagccgagatcgtgccattgcactgtagcctgggcgacaaacatgaaactccagctccaaaaaaaaaaaaaaaaaaagcaaaaataagccaagtgtagtggcgggcgcctataatcccagctactcagggagatatttgcacacctgtgctcacagcagcgtgattcacaacagtcaaaaggcaaaaatcaacccaccggtccatcaccagatgaaaggatgaacacagcgtggtccatccgcacatcgcaatatgactcagacttaagaaggaagggagtcccgggccgggcgcggtggctcacacctgtaatcccagcactctgggaggtcaaggcgggcagatcacctgaggtcaggagttcgagaccagcctggccaacatggtgaaacccccatctctactaaaaatacaaaaattagccgggcatggtggtatgcgcctgtaatcccaggtattcaggaggctttggcagaattgcttgaacccaggaggtggagcttgcagtgagccgagattgtggcactgcactccagcctgggtgacagagtgagactccatctcaaaaaaaaaaaaaaaaaaaaaaaaggccgggggctgtggcccacaacactttgggaggctgaggcaggtggaatcccaacactgtgggaggctgaggcggacagctcacaaggtcaagagatcgagaccagcctggccaacatggtgaaactctgtctctactaaaaatacaaaaattagccaggcatggtgacaggcgcctgtagtctcagctactcgggaggctgaggcaggagaatcgcttgaacccgggaggcagaggtttcagtgagccgagattgcgccactgaactccatgctaggtgatagagcaaaactcgttctcaaaaaaaaaaaaaagtaagggaatcctgacgcaagatacaggctagattggatgcaccttgaggacaacatgctcagtgcaataagccggatacaaaaggacaaatcctgtgtgattccactcctaggaggaccctagagtggtctgagtcacagagacaggaagtaggatggggggtgccaggggctggggagggggatggggagtgagtgtttcatgaggaccaagtttcagttggggaagatgagaaacttctggagatggatggtggtgatggttgcacaactctgtgaatgtagttaatattgatgaatggtgcacttaaaatggttaagatggaaaatttggggcccggtgtgacggctcacgcctataatcacagcaactcaggagatccatagcaactcaggagactgaggcaggaggattgcttgagctcaggagtttcaggttgtagtaagttatgggcatgacaatgtactccagcctgggcaatagagcaagaccctgaccctgggcgacagagcgagacccccatctcaaaaaaaaaaaaaatttctgaatgctgactgaaagccttctatcgagttttcactgcttcttgagtcagttttgtgaagttttttttatttgttttgtttttgtttttttttttgagacgaagtttcactcttgttgcccaggctggagtgcaatggcataatcttggctcactgcaacctccgcctcctgggttcaagccattctcctgccttagcagtggcatgatctcggctcactgcaatctctgcctcctgggttcaaatgattctcttgcctcagcctctcgagtagctgggattataggcatgtgccaccacgcccagctaatttctgtatttttactagagacggggtttcaccatgttagccaggctggtcttgaactcctgacctcaggtggtccgtccgcgtcagcctcccaaagtgctagaattacaggcatgaaccaccgcacccggccagtgttcagaaattaatggatggatggatggatggatggatggctggctggctgcctggctggctggatggtgtattagtctgttttcacagttttcagaactatctgagattgggtaatttataaagaaaagaggtttaattgactcacagttcctcaggcttaacaggaagcacgacttgggggtcttaggaaacttacaatcatggcggaaggcgaaggggaaacaaggcatgtcttctcatggcggcagaagagagagagagagagagaatgagagagagagaaactatcatacattcttttttttttttttctgagatggagcttcgctcttgttgcccaagctggagtgcaatggcacgatctcggctcactgcaatctccacctcctgggttcaagcggttctcctgcctcagcctcccaagtagctgggactatagttcccgagtagctgggactacaggcgtgtgccaccacgcccggctaatttttgttgttgttgttgtatttttagtagaaatggggtttcaccatattggcaaggctggtcttgaactcctgatctcaggtgatgtgcccgccttggcctcccaaagtgctgggattacaggtgagagccactgcgcctggcctgccatatatatatatatatatttttttttttttttttttttttgagacacagtttcactctgtcgcccaggctggagtgcagtggtgtgatcactggtcactgcaacctccacttcctgagttcaagtgattcttgtgtcttggcctcccaggtagctgagattacagacacacgccaccatgcctggctaatttttgtattattagtagagacagggtttcgccatgttggccagaatggtctcgaactccttacctcaggtgatctgcccacctcggcctcccaaagtgctgagattacaggcatgacccactgaggccagccccatacacttttaaactatcagatattgtgagaattcactcactatcacaagaacaccaagggggaaactgccaccatgatccaatcacctcccaccaggtccctcccctgacatgtgaggattacaatttgagatgagatttgggtggggacatagaaccaaaccatatcagaaggataaatgggtagacagatgagtggatagatggatagagagatggacggatggttgggtggatgggtggatgggtgggtggatggatggatggatggatggatggataaatggatagatggatgagtgaatagatggatggatgggtgggtggatggaatggatcgataagtgggtagatggatgagtggatggatagagagatggatgggtggatggatggatggataggtgggtgggtggaatgaatggatggaaggatggatgagatagatggatggatggataaatggatagatggatgagtggatggatggatggataggtggatggaatggatggataaatgggtagatggatgattggatggatagagagatgaatagatagatggatggatgaataagtggatagatggatgagtggatggatggatgggtgggtggatggaatggatggataaatgcgtagatggatgagtggatgggtagagagatggaagggtggatggatggatgaatggatggatgggtgggtggaatgaatggatggaaggatggatgagatggatggatggatgcacggatgactgaatggactgaaggatgaatggaatgcagctgtgtcgtttacaggggtgctattctctaataacacaggttccgttgccttgcagtttaaagaaagccaccatgtctaccttaactgtggacatagcaaacaaggaaatttcatgtgtggatatcaagccactggtaggtcccaaatctttgctgtcccatattcggtgtcataagtgttaagactcatggaagctggccctgaggttgcaatgagctgagatagtgccactgcactccaacctgggtgcaagagagtgaaactctgcctcaaaaactaaaaaaattaaaaataaaaataaacattgatggcataaaaaaatttatggatgcatgcttccacatggatgaacctcgaggagatcccacacagtgagagaagccaggcacgaaaggacaaatcctgtgtgattccgctcttaggaggtccctagagtcatcagattcatagggacagaaagtaggatggggggtgtcaggagctgaggaaggggatgattgaagcagttgaaagcaggcagtcaccatgttggccaggctggtcttgaacttttgatcttggatgatctgcccgccttggtctcccaaagctcccacacttacaggcgtgagccactgtgcctgggccatttttgtatttttagtagagatggagtgtcaccatgttggccaggctggtcttgaactccttttttttttttttttttgacatggagtcttactctgtcgcccagactggaatgcagtggtgcgatctcagctcattgtaacctccatctcccggattcaagcaattctcctaacctcagcctcccgagtagcggggattacaagcatgtgccaccatgcccagctaatttttgtatttttagaagaaactgggttttaccatgttggccaggctggtcttgaactcctgaccttaagtgatctgcccaccttggcctcccaaagtgctgggatcacaggcatgagccactgcgcccaacctggtcttgaactcctggtcttgtgatcctcctgcctcagcctcccaaagtgctgggattacaggcatgagcccctgcacctggccaatttttttttttttaagatatgaatcttgcattctgttctaaggtaaatccatgtttgtcttgctttttggtttgctttatttattttttttattttttgagacggagtctcactctgtcgcccaggttggagtgcagtggtgcgatctcggctcactgcaagctccacctcccgggttcacgccattcttctgcctcagcctcccgtgtagctgggactacaggcgcctgccacca[184 bp omitted]gttcaggctggagtgcagtggcgcaatcttggctcactgtaacctccacctcctgggttcaagcaattctgcttcagcctcccgagtagctgggattacaggcaagccccaccatgccgagctaattttttgtatttttaatagaaatggggtttcaccacattggccaggctggtcttgaactcctgacctcaggcaatttgcccgccttggcctcccaaagtgctgggattacaggtgtgagccacagcacctggctgttttttatttgtaggtacagggtctcactctgtctcccaggctgccgcacagtagcacaatcaaggctcactgcagcctcaaccttctaggctcaagtgatcttcctgcctcagcctctcaagtagctgggattacaggcgtgcaccaccacacctggctaagttttatttttcatagagatgaggtgtcactatgttgcccagactggtctctaactcctggcctcaagcaatcctactggctcagcctctcaaagtgctgggattaaaggcgtgagccactgcgcctggcccatgtttgtcttaatacaaaacagttttcaaatactaaaagtcccttggtcctgtggcttttagactccattgtataactctgagggtgccgtgcactgcagtttgagaagcatgtccctaaggctgtagagtaacccccaattgctctctctgtcttctttctcctttttgtttattcattctaggccattgatttattcattcattcattcattcattcattcattcattcattcattcattcatacatgcatgcgtgcatttttttccccatgctctctgtgtaccagggatcatgctgggctcataaattagttctgggcctggcatggtggctcacatctgtattcctagcactttgggaggcccagg[131 bp omitted]gaggcaggagaatcgcttgaacccagggggaggatgttgcagtgagctgagactgggccactgcactccagcctgggtgacagagcaaaaactctgtctcaaaaaataattaattaattaaaagaaaaagttaattctggtctccgtgaagccactaatagctcctcaggcgacaccaggagtttagccataccccaggctctcagagcttaagctccgcggggccagctgcagttacggtgcatcccaggcatccagggacacgctgttgggatccaggccacatggtttccaaaccattcccacaggagtgtgtccctgtatagggttcactgtgtccgggtgaccctcactgacctgggtccatatttctgtctctctcctctgcagtcgacactgatttcagttggctgcgacctggataaaaagatcgtcatccagaagtaagtatgttgaggccgggcaccatggctcattcctgtgatcccagcactttgggaggccgaggtgggcagatcacttcaggtcaggagttcaagaccagcctggccaacatggcgaaaccccgtctctactgaaaaaaaaaaaaaaaattaggcgtggtggcagacacctgcaatctcggctacttgggaggctgaggctggaggatcacttgaacctgggaggtggaggctacagtgagctgagattgagccactgcactctgcactccagcctggctgacacagcaagactctcgtcttgaaaaaaaaaaaaaagtaagtatgttgatattggagtggagtgaggagaggggaggagagtagttgacagggcacgattagccacatggtaacaattgctgaggtggatgactttcgattatttagttttgtatatatttactatttccataataaaaagttaaatgattcaccctaataggttaagtttgtttccagcatgttggcctcccctccttcacctgttggtgatatccacatttttttttttttgagatggagtctcgccctgtcacccaggctggagtgcagtggcacgatcttgactcactgcaacctccgcctcccaggttcaagtgattctcctgcctcagcctcccaagtagctgagattacaggcgcccgctaccatgcctggctaatttttgtatttttagtagaaacggggtttcaccatgttggccaggctggtctccaaatcctgacctcaagtgatttgcccgcctcagcctctcaaagtgctgggattacaggcatgagccaccgcaattggccta[223 bp omitted]gaggcaggagaatggcgtgaacccagga[139 bp omitted]tgcccctcccagagctggggtctctcaggtttttttttttttccatatctgctcatttggcaactgctcatgcattagacgcaaaggtgtgccctcccttttatatattattattattattgagacggagtcttgctctgtcgcccaggctggagtgcagtggcatgatctcggctcactacaagctccgcctccctggttcatgccattctcctgcct[183 bp omitted]ttattttaatttttatcgatttatttttgagacagagtcttgctctgtcacccaggcaggagtgcaatggtgcaatctcagctcattgcaacctccgcctcccaggttcaagtgattctcctgcctcagcctcccaagaagctgcgattagaggcgcgtgatgccacgcctggctaactttttgtatctttagtagagacggggtttcctcatgttggccaggctggtctccaactcctgacctcaggtgatccgcccgcctcagctcccaaagtgctgggcctgagccaccacgcccagcccctccctttctgtcccatccataatggtttggttctttgtgaggtcatgccattgctcaatgtccacttttgcttgcagcaaagtttccgcctgttccatgggcatcctggaccccttgaccctgcaagacaattacagcttcatcatcgagaagtaagccagcgtccccccgcaacacctgacacccaaggcgaccattgggcctgcaaaagccaagagcaaattaggaat[134 bp omitted]gcctcctgagtagttgggactacaggttcccgccaccaggcacggctaatttgttttatttttagtagagatgaggtttcactgtgttagccaggttggtctcaatctcctgatctcgtgatccgcccacctcagcctcccaaagtgctgggattacaggcatgagccaccgcgcccggcctattattattttttaagagatagggtctggccctgtggcccaggctggagtgcagcgatgcgatcatagctcaccacagcctcgacctcctgggctcaagtgatcctcttccctcagctggctggtcccacatgctgtccggctcagtgagcatgtactgccacgcccatacgagagtctgggcctcagtcaatttgtgctgctttaaaagactacctgaggctgggtgatttataaagaagagttatggccgggcccggtggctcacgcctgtaatccctgccgaggtaggcggatcacttgagctcaggagttcgagaccagcctggccaacatggcaaaaccccatctctactaaaaatacgaaaattagccaggcatggtggtgggcacctgtaatgccagctactcgggaggctgaggcaggagagttgcttgaaactgggaggcagaggttgcagtgagccaagattgagccactgcactccagactgggcaacagagcaagactctgtctcaaaaaaaaaagagagagagagagaggagggaggaggctgggtgcagtggctcacacctgtaatcccaacactttggaaggctgaggcaggaggattgcttgaggccaggagtttgagaccagcctgggcaacctagagacaaaaaaaaaaaaaaaaaaaaagagggtggtgggatggggggaggaggtgccaggctcttaaacaagcagttctcatggaagctgagaatgaaaacccactcagtaccataaatatggctccaagccattcatagctctgccgttgtggcctaaacacctctgactaggctcccactccaacactagggatccagtttcagcaggagctttggaagggacaaatatccaaaccatacgaagacccctcattgcacccagcatgagggagctccttgccacgcgagtgcacacttccatgtgatttgtaagacctgagccctcaaatgcaagtcaagagtcagttacccatttagagctgaggcctaaactagtgcttctgggctgctaaggggcagtgactttggaacctgcggaggacacagaggggagtgtcatcttagtctatgtgggctgtattgcaaaatgccttaaactgggtaattt[131 bp omitted]gtgaaatcccgtctctactaaaaatacaaaaattagccaggcgtggtggcacatgcctgtagtcccagctactcaggaggctgaggtgggagaatttcttcaacccgggag[137 bp omitted]agtgggtcacccctgtaatccctgcactttgggaggctgaagtgggtggatcacctgaagtcaggagttcaagaccagcccagccaacatgatgaaacccacatctctactaaaaacacaaaaaattagccgggcgtggtggtgggcacttgtattcccagcttctcaggaggctgaggcaagagaatcacttgaacccgggagagagaggttgcagtgagctgagattgcaccactgtgctccagcctgggcaacaagaatgaaactccgtctcaaaaaaaaaaaaaaaaggcaaaaacctcgattacttttgcactgatctaatttaaggagcagaaattttgctgggcttggtggcttatacctgtaatcccagcactttgggaggctgaggtgagggaatcacttgaggccaggagtttgagaccagcctgggcaacacagcaagacctcatctctacaaaaatttaaaatattaaccatgcgtggtggtgcgtgcctgtaatcccagccactcgggaggctgaggtgagaggattgcttgggcccaggaggtggaggttgcagtgagtcatgactgcattactatgctccagccaaaaaattaactagaacagaagttccaatatcatctggtccatggctctcaatcgcccacctcagatgccacctcctgccactctcatggacgatccccatttgcaaaaaagaaactgcggctgtgaagggttggcagactgggcaggaactcacagactccccatctctgcttcttggtgtcttgaagggaattctacgaccccggcttccaggggcagcagtcctccgaggacctgcacgtgttttactcctaccagcagctgggctgtcctctcctcgtctactatgacaccctatggaagcccgtggtggagctgtaagaccccaggggggtgctgcagggtggggacggtggcagggcctcatgctccctggccctggggtaccagcctggccctccaggctcccctagatccctcaaaatgatgatggtcactgtttcccaccgtgctcctgccccagccccactggcccccagggccctctccctggaacaccttttctttttttgagacagggtcttgctctgtcgcctaggatggagtgcagtggcatgatctcagctcactgcagcctctgtcccttgggctcaagcgatcctcccacctcagcctcccaggtagctgggaccacaggtgcccaccaccacacccagctaattagcagagatttggtttcaccatgttgggcaggctggtcttgaactcctgacctcagatgatccgcctgccttggcctctcaaagtgttggaattacaggcatgagccactgcgcccggccgatgggcttttctttatgcctgtgcactcctgctgtcttcctgttcttttttttttttttttccactctgtcacccaggctggagtgcaatgacatgatcttggcttactgcaacctccacctccagggttcaagcgattctcctgcctcagcctcccgagtatctgggattacaggcgcgtgccaccatgcctggctagtttttgtatttttagtagagatggggttttaccatgttggtcaggctggtctcgaactcctgacttcgtgatccacctgcctcagctttccagagtgctgggataacaggcgtgagccaccatacctggccatcttcctgttcttataaggacaccagtcttatcagatcagggcccaccctacatcctatgacctcatatagcttttctttttcttttcttttttctttttttcttttcttttcctccctttcctcccctcccttccttccttcatttccttcctttctttctctctctctgtttccttttttctttttttttttttgtgttggcgtcttgctctgttgcccaggctggagtccagtggcatgaacacagttcattgcagccttaacctcccaggctcaagcggtcctcctgcctcagcctc[164 bp omitted]ctcctgcctcagcctcccgagtagctgggattacaggcgcccgccactgcgcccggctaattttttttatttttagtagagatagggtttcaccgtgttagccaagatggtctcgatctcctgacctcgtgatcctcccgcttcagcctcccaaagtgctgagattacgggcgtgagccgccgcgcctagctccgagcagacttttccttccaccctgttatcaatgctcagtgctggctgctgcccatctccccatgcacccagctctttctcctggcctccccgcagcccacacacggcatcctcagctgggagcggcaggcgtcctttggtttcctctctgtcacctcccaccccccaagcggttttgcagccgtccaggtggctgtggcccgggtcttcctgggttgtccctgctccctgcacagccctgccccgtgcctgtgtcctaggtggcgaaaagacagtttccaggaggtcatcgacgccgagtatgtgttactggaggtgaacgggcagttctcatactcctattccctgacggcccagtcggccatgtgtacctcccagccgcagaactggaccaccatgataaaggaattcggggggcccttcttctggaacagagaggtaacaggaccctaggatcgtttccagaagaatcagcagcccaccagggggtgggagagtgcgt[139 bp omitted]tggcaaaagcccgtctctactaaaaatacaaaaatcagtcgggcatggtggcggacacctgtactcccagctactcaggagaatcacttgagcctgggaggcagaggttgcagtgagcacagatcacgactgcaaaagactcgaaggtcctttaggggatctagcaggaaccccaattccttttaggggtgtacaaggcctttgaggatttaaggaactgaccgaaggacgggaaatgcaggcaccaaggtgttcagggggctttgctgatgatgagaaatgcctgggaccatcccaatgcttgctactgagggatggatggaattcccgggctgtcttactcagtgtgcatctgttttatttttatttcttttaggcagggtctcactctgtctcccaggctggagtgcagtggtgcaatctcagctcactgaagactcaagcctcaagtgatcctcccacttcagcctcccaattagctgggactacaggtgtgtgccaccatgcccagctaatttttgtatctttttttttttttttttgtagaggcagggcttcagtatgttacacaggctggctttgaactcctgggctgaagcgatcctcccatggattataggtataagtcaccacgctcagcctcagtgtgtatttctatcatacgagtgatgtcctgtccctacaaagagattgcatcagtccacgtgtatcttcccgggacacaatgttttgtatcaggaatgcagtgcatgcagcaaagccaccagcagatggtgtcctggctctttttttgcatttgctttttttttttttttttgagacggagcctcactgtgtcccccaggctggagtgcagtggcgcaatctcagctcactgcaacctccacctcccgagttcaagcaattctcccgcctc[206 bp omitted]ttcttcatatgggctgtctcattgcaaattgcatgagtgcatttaagagatggccccattactattttttttccatcagct[137 bp omitted]caaaaccccgtctctactaaaaatacaaaaattacctgggcatagtggtgcacgcctgtaatcccagttactggggagcttgaggcaagagaatcgcttgaacctaggaggtgaaggttgcagtgagccgaaactgcaccactgcactccggcctgggcaacagagcgaggctgtttctcaaaaaag[141 bp omitted]tgaaaccccgtctctactaaaagtacaaaaattagcagggcatgatggtacccacctgtagttcccgctacttggaaagctgaggcaggagaattgcttgaacctgggaggtagacatcgcggtgatcccagatgacaccactgcactccagcctgggggacagcagaagaaaatgtctcaaaataaaaaagtcattggaagcgcctgactctcacccaggctaagttattaagcctccagcctccacagcccaggaaggcctgaaagcaggcatgtggcagactgccacggttactacttgagacggtcactacaacagttactactgctactacttgagaccttcgttacaagactgaaggaagggggaacgaatgtagaaatgaaaacttaagacaaaagaaactgttttaaagaagaggcatggggaagaagagagctccccgcttctagtgagtaaaggcagtccctcaagcttccacagacctgcgtatttattgagtagaaacagcagggaggggccaggcgaggtggccacgcctgtaatcccagcactttgggaggctgaggtgggtagatcacaaggtcaggagattgagaccatcctggcttacatggtgaaaccccatctctactaaaaatacaaaaaaaaaaaaaaaaaatttgctggccacggtggcgggcacctgtagtcccagctactcgggaggctgaggcaggagaattgcatgcatccgggaggcagagcttgcagtaagccgagatcgcgccactgcactccagcctgggcaacagagtgaaaccccatctcaaaaaaaaaaaaaaaaaaagaaagaaaagaaagaaagaaagagcagggaggagcaggtaacgattggtcagctggttaattgattacaggttcatattattactaataggcttcagatgtaccaaatcagaagaaacactgtgcctggctcgtgaccgccctcagcattccttctgggcggcagacgcagtttgtcagtttgccaacattctgcttttatgagaaagtttgctgtttactcatatggcctccagtggtatacggagttgatcaccaccctcaatctttcggcctccaacagaggcaggtgagatggaggctgagcagcctccatccactcttctctgcagggagcatgaacctgcccacaccatgggcacttggccccagagtcccacccatgcgtgcctaatgaggactggggtgggtgcagggcctccgcagggaggagggaggctcagggccccctccccagtccctagggccagtgggcatgtctctgtcccccacagaactatgtgagctgccacgaccccaacaacaatgcccctttgaggtggccagacgtccagtatcagatcttgggcggccggacagcaaaccagatcattttcggccacaatggcttttatgtcttctacatttcgatcgtggatccgtactacaggtgagtgggcccatctgcccctacgacaggggacgcctggtgcccctgggggcaggtcacccgtttcgggggacatgcaggtcctggctaaacctgaattcccccaacagcccaggccgtccccaggacaagtgatgttttaagttctgggtgacatttgttcccatgtgaactaaatactcatttcagagtcctgcactgagtgctgggggaacagcagtgaccagaggctgtgccgctgccctggcgcacctgagtcgccctctcctactccccatggctagagtgtgctgatggctgtgggccagagctggctcaaactggctcaccaggagtagactctcaaatattcaggaatcttcagcctggccaacctggtgaaaccccgtctctactgaaaatacaaaaattagccggctgtggtggcaggtgcctttaatctcagctactcgggaggctgaggcaggagaatcgcttgaacccgggaggcagaggttgcagtgagctgagattgcgccactcactggcctctagcctgggtaacagagcgagactccatctcaaaaaaaaaaaaaaaaattcaggaatcttacaccaatcaatttcatgtcagtggcttcgaatcagccacagtggaaatatttacactacgggaattggcagacactacccaggaggcctttcccctctgagagccagttgttaaatatttagcactgacaggtgctgaggagattataaagccacatcgaagccatgccatgtggatcagtgtgtccctttggaagggggacaccaggtggaaatcttcctcatatcctcacccctactggaagtcattgtcacttatcacctgtcctctccagtaggatgaaagttcaccccctgaaaaaaaaacacgtggaggtcctgccttctctagaggccccagactaggaggatcagctccggggtggcagcaggtggaaggcactgggtagggtgaggatgtccaccagagagaggagacatgtgtgggactctcccgtgccacaggtgctccctgcatcacgtgacctgcactgtccccctccctgccgtggattctgtgacacccctgaacctttcctgccctgacctagcctccactgtcacccaccacttcctagttgttgatggaccatttagttaatttgccccttccgccctctctagccagagcctgggcattgggggagaatagggatcctggtgacagctgccagagggcatggagaggatggctgactcagaacccataaaagtcggcctggcacaatagcttacgcctgtaatcccaacactttgggaggccaggacaggtggatcacttgaagtcaggagttcgagacaagcctggccaacatggagaagctccgtctctactaaaaattagccaggtgtgatggtgggcgcctgtaatcccagctactcgggaggctgaggcaggagaatcgcttgaacccgggaggcagagattgtagtgggccgagattgcaccactgcactccagcctgggtaatagagccagattccaccgtttcaaaaaacaaacaaaacaaaacaaaacaaaaacccataaaagtcaaagtgggccaggtgcagtggctcacacctgtaatcccagcattttgggaggcagaggcgggcggatcacttgaggtcaggagttcgagaccagcctggccgaggtgaaaccccatctctaccaaaaatacaaaaattagccaggcatggttggcaggtgcctgtaatcccagatacttgggaggctgaggcaggagaattgcttgaattcaggaggcggaggttgcaatgagccgagatcgtgccactgcactccagcctgggtgacaagagagggactccgactcaaaaaaaaaaaaaaaaaggcatagtggatggaaacagaagtgggtatacccggtcactgctgtgggcctggttctccctcctgtgggtctgaacacctttgccagagataaggcgaagtcccccaaaggcaatgcccaacagcctctccccgcctccccccaccgcagctactgtcaactggagaccatctttagcatctacgtgtatggagcattccccgtgcagctggtctctgctggagtcgtcatcctactgatcatctccagcatcctggggtccgtttggctggcctacaagacccccaagctgctacgcacagcacgcggccgcaggatcaagaagtgtgcgacacagctgtgtaggagatgcaagacggtctgccagttcagggcctcagccacagccagggcaggcacagagcccccgggacgccaccgcactcctcacggaggcaggtctgaccactgaggccggtccacagggtcccaaccccttgtcttcaaataaagtataatgtaacatagcagg[135 bp omitted]cctgcctcagcctcccaagtagctgggactacaggcgcccgccaccacgcccagctaatttttttgcatttttagtagagacagggtttcatcgtgttagccaggatggtctcgatctcctgaccttcgtgatccgcccagctcggcctcccaaagtgctgggattgcaggcatgagccaccatgcctggctttttttttttttttttttttttttttttttaagtatcagtgtggtctcattgtgttgcccaggctgagagtgcggtggtgtgatcacagctcactgcagcctcaaactcccaggcttaagtgatcctccctcctcagcctcctgagtagctgggactacaggaaccaccaccacacatggctaattttacttttagtttttgtagagacagggtctcactttgttgcccaagttggtctcgaactcctggactcaagcgatcctcctgcctcagcctctcaaagtactgggattatggatgggccagtgctctagggttagccatctctctgagtgagatggagtctcactctgttgcccaggccggagtgcagtggtgtgatctcagctcactgcaacctctgcctcccagattcaagcaactctcctgcctaagcctcctgagtagctgcgattacagacgcctgccaccatgcctggctaatttttgtatttttggtaaaggcagggtttcaccatgttggccaggctggtctcaaactcctgacctcatgatctgcccacctcggccttccaaagtgctgggattacaggcgtcagccaccgtgcccgccccacccccgaccttttttttttttttttttcggagacagattcttgctcctttgtcctggagtgcagtggtgtgattttggcttactgcaacttctgcctcctgggctcaagtgatcctcccacctcagcctcccaagtagctgggactacaagtccacgccagcatgcctgggtaattttgtttttttactatttttttttgtagagatggggttttgacatattgcccaggctggtctcaaactcctgagctcaagcgatcctcctgcctcagcctcccaaagtgctgggattctcagtgaaccactgcaccagggtcagccatctccttttaagtgaaaatttggtcagtctcatgacttccgattactctttggttaaaaaaatatatatataaaatatacatacataaaaaatacatatataaaatatatatattaaaaatacatataaaaatatgtataaatacatatatatattaaaaatacatatatataaatacatatataaatatatattaaaatacatatataaaaatatatatattaaaaaatacatatatatattctgtgatcattttaaattgccccacatagctacaacaggctggggcagggggatcacttgaggccaggagttcaagatcagcctggacaacatagcaagaccccccatctctacaaaaaaatttttttagacattagctgagtgtggtggtgcatgcctgtagttccagctacttgggaggctgaggtgggaggatcgcttgagcccaggaggtcgaggctgcagtaagccatgatcacggcgctatactccagcctgggcaacgtagcgagaccctgtctcagaaagaaaaaaaaaagctactgcttgggtccttgcagacatccactgtgtgaccctcactccacattaatcttcaagaaaagtgatccaggtccttgccccacttcctcatcagccaggacctccccgacacttgggatacctggttttagtttcagagatacccctaatgaggcttcggggagaaggagttgaaaagcagctgagaaaagtgggcttggggctgggcgcggtggctcacgcctgtcatcccagcactttggtaggctgaggcgggcggatcccctgaggttaggagatcgagaccagcctgaccaacatggtgaaatcccgtctctactaaaaatacaattaaccaggtgtggtggtgcacacctgtaatcccagctactcgggaggctgaggcaggcaggagagtcacttgaactcgggaggcggaggttgcagtgagccgagatcacgccattgcactccagcttgggcaacaagagcgaaactctgcctcaaaaaaacaaaagtgcacttggagtctctcccagcctgtgtccccacgggtcaaacagtgatgaatggggatcactgcagatgccaggagggcacatggcacagtccctgggacagggggaccctgtcttgagggccacagctgcatggccccgagacactacccggagttgtttttgttttttgaaatggagtcttgctctattgcccagggtggagtgcagtgatgtgatctcggctcactacaacctctgcctcccgggctcaagcaattcttgtgccttagtctcctgagtagctgggattacaggcgcctgccaccatacccagataatttttgcattttctttttttttttgagacggagtctcactctgtcgcccaggctggagtgcagtggtgcaatcttggctcactgcaagctccgcctcctgggttcacgccattctcctgcctcagcctcccgagtagctgggactacaggcacccgccaccacacccagctaatttttttgtatttttagtagagctggggtttcatcgtgtttgccaggatggtctcaatctcctgatctcgtgatctgcctgccttggcctcccgaagtactgggattacaggcgtgagaagctgcgcccggccaatttttgtattttcagtagagacagggtttcaccattttggccaagctggtctcgaactcctgacctcaagtgatctgcccgcctcggcctcccaaagtgctgagattacaggtgtttgccactgcacctggcctcctcctgagttttttgaataagggtttccgggagagtagctccagagagcagcaggcacagtgccctacacagagccgggaccatggtctctgctcggcctccaaacacccatcagcctcctggactctaggtgagcctcccagggcctccccaagcagaggccttgaaacccaaactccggagacccaggagatccagcccgcagcctggggaaggggtaggctgaaggttcccatcccagaggggtgtcctcatcccaggaggcgctggatggcactcgacctcctgtttccttatgtgtccctgggggaatggggtcagcctctccagggccaccatgagcgtttcaggggaggagggtacaggtggccactgcctggacccccaggagggctctcgagaccctgatgtgggtaagcagtgacgggaaccagcacccggaggtcgttcttccgaggctgggcccatcccattttggaacgagtagccaggctgtccctgccaccccggaccccgaagtgtggccgggtggggcccctgaccctctcctgggctccaggtgctgtctcctgtctccatcttgggtgcacatgccaggccccctgggtgccgtgtgctccccaccccttcacgcgtgggcactgtctcatccctgccccagcccccaccctcagaccatcaggtgaagcccctgcacccacctgtctgtctgaacaagagcgtggcccttcccgccctgcctgcagtggctgtggcttcctggggacaggaggcagctgggtggggatctggaggatgctcctcaagccctgccctgatggctgtgtgtctccaaggaagttcctgctgctctgggcagccttgctttcccccaccaaacaaaggggtgaaaacccttagaacgcgttgagtctgggggtcagctccctcgtgccccaggaggcccctgcctctgccagaggagtctgatgttccagggctgggactcaaggagtttagggtgtcctgtgattccggggctcccctgctaagaggcctcactgtgaggccgggggcgctgccttgccagtccgcgggatgatggggtgaggggccaggcgtgcatctccagccccctccccatccccaaggcccccacgtggacatggagctgaaaggtcaaatgtgctttaatgcggggtggctcccaggtcctccctgggccccgggggagtggcgctggctgggcctgccggctgcctggccttccttcccggctttcccttcttggccgtcgaggcctttctcttgccagacagaatgggggccggggtgttggtggcagggggccccgggtggggcggctgctcctcgtcgagcgccttgaagttgaagaagtagtcaacgttggacacggtgtccaggatctcaggcacgctgtagtcaaaggacagcagctcctcgggcaggcacagcgagcggatgtcatcggctgagttcccaccactgctgtcaggcagggccggcccagggacctcgcacagggtaccctcaggctcagaggcgcctggcaggcagtcgaagagcttcatggcgtcctccagcagaaccttgtcaggcagtgccaaagctctggccgtcttgggggccttggccttgcctgctcccagcagggccccctccttgacctcggccaccttgagctcgctgaggcccggtgggtacaggggcaccccaggtcgggccccactgccctgcagctccttgacggggaaggccaggggttcgggcccagggaagtggccgaggtgaccctggaggtggctgtaggcgtctgggggcagtgtgggctctgcaggcagcgtgatgagtacagggggcggcttgttctccttggggggtgggggtggcagcggggccgggccttcctctaggggcggtaggggcagctccacgaaggcggcgggccctgcgtcccccacaaaacccagagcctctggcccggggccctcaggcgggaagtagggcaagagaaactggggccccccgggtgcctgctggtagtgggggtatggaggcagccccggggccttgaggtagggctgaggctccaggaggtagctgcctggggcggaggggacccccgctggccccccgctgcttgctgccagcttatacagggctgactggcccaggtcgggggtggtccactcgatccgatagatgcgggggtcgaagaagcacccgcatggggccatctggaaacctgtgggcggcaggcgggtgccctgagagcagctgctgcctgaggggcccagcccaagcctgggggcctgtttgggagatgccacaagaaccttgccattggggggcccctttgggggacgacatagatattgctttggggccctggctgggtgatggatgacacagagcttgtctttggggctcatctgggggacctgtgtgaagcatggggagcagaggccatgccttcaggctcccacttagggacggggcaggggcaagatgggcctgcacactcaaacccactcccagcctcgtcaagggctcaggggaggccggtacctgctggtggggctggaaacacctctttctctgggtctgggggatgatacaggttcaaggagcctgtggacaaaggtgcccaggtgggtagggcccttaggcgggtgggcccctgaaccctctccagcaggtgctcccacccacccgatcgtacccatagcgggaggaggctcggcacaggtgggagcaggctggttgcccagcacctcagccccctccagactctgcgggctgaaaccttcctggggagctgcaggggcacagaacggtttggggtgctgcatggggcagcggggggcccggtccagacaggccaggagggcggcagtgggagtgcaagtggcccaaccggagaacaggctgagaacctggtggggttctgtttgcctggttactcggggcagcgggttccagcctgcagcgcgcccactggttggggttctgggtgttgggggcaagcaggggcagacgttggcagacatggtcatcaccatgggagggaggattctgggccaggcctttgcctcttccagcaacacccccctaacagctttgaggccgcctcctccaggcaggctgccctgatccacacccacacaggctgaggccccccgggtcctcaacccgctaccttcttgggggtcaaggcctctctgggcaccagcagcacccagcttggggcagggcccatggaggcagctaagaggtttggggaaggtgggggccgaggaggggctgcttcagggtcacagaaaggcctggattttaaaagaataaaatttattgtactctcctcgccccagggtgcccctgggaaagcctgaggctacttgtacgcgttggccttgtgcttcggcaagaaggcgaagctggggggcactggcccaaggagcatctcgctgtgggagagcaggtggaaagcgaggtcaggcccaggacctgcaaagtaccctccgtgaccccgggcccccgactgcagctccccaactccagcccacccaggcacctgatgcggatccagtcggctgccttctggctggccatcagcgtctccaggtagtcgcggcccaggtagtagggcggccgctcgttgatcctctgtgggagccgctccagcagccccacgggcacgtacctgcggcgggtgggcgggcaggacaggcttgagtcagctctaaccagccgcggcccacgcgccgcccaccccagccagccccggtgcccaccggcacaggaaggacagccactcgagcagaaagcgccgggtcttctccacgccctgcgtgtccgagccccagtgctccaggccgtagttggtgaagtcccgcaggatgtccaggcgctcggacgacgagatgtcccagtgccgctgctccttgatctccgtgaagagccacggcttgagcagggcgccactgtgggacgggtgacgatcagtgggcccagccaccagcctgcctgggatcgtgtggcctctgcttccatggcctggcctgagccggagcccagaccacaaaacctacaagcctagtaagcctcccagctgcatgcacacaaccttcaaagcacaggactttcttttgttttttctgagacggagtctggctctgtcgcccaggctggggtgcagtggtaagatctcggctcactgttcaacctccgtctcccaggttcaggcaattgtcctgcctcagcctccctagtagttgggattacaggcgtgtaccactacacctggctaatttttgtatttttaatagagatgtttcaccat[137 bp omitted]gcagcagcaatttccagtcccctctgccgcaacgcagctgcaactcctgacatcgctctctgctcctcccatcttgggaccaacagcccaccacagaacaggggtgggtgacggcgtgttgggttcagggcactgctgctgtgcatgaagctggatctctaacatccctgggcacttaccgggcaatcatgatcccggtgacaccagtctgcatggcgcggttggcatcctcaaatgacaagatgtccccatttcctgaggagacagaggctggggtctcagggagacatgggcaggtgggaccctggagttctgctcaccagcccttcaggagttttggctgacccagtggctcccatcagggtggtacgagggggtcccaagtgggaaggcgaacagcccagaggtgtgagtgaccaagggtggtaggggagagggaggtggcttcccggaacacccaccgaacaggggcatggggctggcggcctgcacgcactcctcgatgtactgccagtcggctagcttggtgtagcgctgctcccgagagcggccgtggagctgggggagaagccgccacgcagggtaggaggcagagagtgagacgcagagaggaagagaccaagagagccaggctgagagagacagagagagacacaggcggagacagagggaggtgtggaggtgaagagggagggatgggaggagaggagccattaggaagggacgcggggtcgaccgcgaggccccaatgcccgaggcgtcccaagacccaccgtgacgagtgccacgccccagtcccgcagctcgggcagcaggcggtgcgccaggttcacacgctcctggacgcctgtgcggatcttcacagtcagcggcacatccagcacctacaggacggtggtgggaggtggtgggagatggtgggaggtggtgggagacggtgggaggtggtgggagacagggcccgggggagttgtttgggagccagtgcgaggatgtggctggccgtacctggttcatgccacggacgatctgctggaacttggtggagcgattcatgagggcacagcccccaccctggaagagacaggcgggtggagggagggcaggacgtgggctgacccaagacccctcacccctgctgcccggaggcccccaccaggagacgccgacctgcaggaaaggcagggactccagggccacacttgagcccaaacccctgaccctccaccgagacatcgccggctgggtcagtgcctccctgcccagatggggaaaccgaggcacacgtccagggccgctaccttcttgtacacgaggtcgatggggcagccgacgttgatgtccacaaagtccacctccacggtgcggctcagcagctcggcacacttggtcatggtgtcggggaaggcgccctccagctgtaggtgggtagtggcagaacaggagggtgaggggagagtccgaactgtccccacttggccgttccctccccactggggggccctgagccagtggcctcctctctcggggcctccccggaaggagccaaggtctgtctgcgaggcaccggtccccggccacggccatcagcccccagaggtggatcagggcatcacccccactccacagctgaggccagggggtcagggaggcaaccagggcagacctggaacctggctctgagacaggacggccgagggcccctccactctccctccctcggggtgggcactgacctggacgccaaagatgtcctcacactggtggcgtttgagtagggcccactcggacatctggccctgcagcaggttggtgcagacggccatctctccacatgtcacatccgccccgaagcgcttgcagatccgtcggaagggcaggttcccacactgcggggggagcaggacagacacacatgctcttgcacgcgcacacacacacacacacagcagaaccctgaatatgcgccccagccccacaatccagtaggtggggacagacactaagccctgttggaatgaccacactgccaccctgccacccgaccagccacctgacccaggtcctaccgtggtgaggggggccaggtaaagtttgccacggatgtccagctggagggaaaaaaatacacacaagtggagcttggcctccaccccagctgctgaggccctggagcctcccttctacccacagtctaggacacacttggcccaaatggtctggctcctttgctgggcctctgcatgtgccaatcaatcccttcatcaggaatgttcctttcctcatcgtctcctccactggagagcttctacttaaccatccaaacccagtcccaatgccccctcttccaggaagcctcccacatttgtcccccgctgcccgaccctgaccctctgagacttagagtgtgtccagctctttttttttttttttttttgagatagagtcttgctctgttgcccaggctggagtgcggtggcacaatcttggctcactgcaacatccgcctcctgggttcaagtgattctcctgcctcagcctcctgagtggctggaattacaggtgcccgccaccaggcccggctaatttttgtatttttagtagagatagggtttcaccatg[139 bp omitted]aggacagagcacagagagggagactcagccaggagctccctcaaggcacacagcctctgactcccaggcagctagaacaggaacgtggacacagctggtatttaatagacgcacaccagatggacagatctgctactgacgttgtcctcaacacgtacccgcttcttctcacagggccgcagcctgaccacgtcctcatccgtcaggggcccgcaggtccgcacggggctgctgggaggggtgctagtgcccggccctgcggggacctgctgggcaccacagttttcctgcctgggagcgccctcggctgccgtgccctcggggacagcggcagcgggtgtggggccctggctgaaccggcgcagggcctgctcagctcgctcgaagcggacctcgcgcttccgcagctgctgctgcagggctttgtccaggccgttgcggatggacgggggctgggtcccgcgggccgccaactcctcctgcaccaggttctgtccctcgggcctcaggtgggccccagcgaagcggcaggtcacgccgtaggggcaccggccgaaggtctcgaagagcacgcagcgggggcccaggtcggccggcttggtctccaggtagcgccccacgtcgtgcagaaagcggcagcgatcaccgaagaaacacttagcagccgactcctgcgaggaaacagggaagcagtgagggaggacagggagaccccggggcagcccagcagccagggttcaaactctagatcacccctcctggctcttgtgtccctgagcaagtcaggcacctcaccgtgcctctgcatctccatttatacaatgagaacaatgacaagccctacaatgtatcccgaggagaatgaagacggaatggcatcagagcaagctcactgctcgttgctgaaggcccaggagctttctaacaattacccgctgccaggaaacacaccctgctcctgcctgccccggcaggaatgctcacgtggccgcacttgcctggattagggagggacacagcctgttcttgtcgtagttcgtgggcttcacatggggccggcccttgttttgtccccgggccctcttctgagtctgtagctgctccccgggctctgctgcctcctccgtctgcccgtccgccgtctgtccatcctccagtcggatccgcttagcctcaggctcagccagctcattgccagcagggtctcctacctcggtttcccggcaagtcttctcctgccctttggcttccaggaattggtgaaactgctccttggtggtgaggtatctgccgacagaaagggaaaggaaaaccctccgaacatagtcaataaacactggggaaaggaggctagaaacacttgcacgtccttaaatccttctgctgatggggagctcactacttaagaaccagccagctcccagcctgggagcccctcacggcctcaaaaaagacctattttgtccctgggtcctcactgtccaaagtgttgcgcgaaactattatcaggttcagtcaagaacgtccctgcgcacgttaggctgcgaaaaactacaattcccagcatgccttgaagcggagtctaagccaccacatttcccagcacgcctttcggcccttcaaacaccgcaggccccagcacgccccgcggcactcgcttcaaccccaagacccgccagtaacggccgctggcagagcacatgcgccgtacgtccatatgcagggactacaatccccagtatgcagcgcgggcctggcctcaaatcccacctgccctagcatgcacgtggtgtccttcgcgcatgtgacaggccccaacgtgcacgatctcaggtacctccgctgaccaccctgcaggcggaagaacggcccggaatgaagagccggtggcttctcgccctcagccgctgcctaatctcccggcatgcacagctcggaccgcgctatgggtgccggaaaaggcccttcagcttccctcctgccccggcgactcactgacgcttaatgggcgccactcctcgttccaaagctccggctcccgagtcgccaccaccaccattctctagaggagcctccgccgttccctccgccatcggcgcccctcacatccgctctggagtgtggcgggaagaccttccgggtcacgcgtgtcttccctgattgtgctggggaagtgcgcatgctcatgtcgttccaatgacgccattgctcgctcgtgacgccacgggggcggtgcctgcacatgggtggagcctcaggtcctatataaactagagcctggccaattgcgaactggactgcaatcagcttctggactgaggaaatttaactgttagggtgttttggaggtttttgtctttgttgttctgttgaaacggtttcgttctgtcgcccaggctggagtgcagcggtacgatcacgactcaccgcagcctcgtcctgggctcaagctatcctcccacctcagcctcccaagtagctgcgtctacagacatgcaccaataggcctggataatttttaaattttttgtagagacgaggtcttgccaggttgcccaggctgatcttgaactcttgggctcaagcgattctcccactttggcctcccaagcattgggattacaggcgtgagccat[136 bp omitted]caacatggtgaaaccccgtctccactaaaaatataaaaaattagctgggcgttgtggcacatacctgtaatcccagctacttgggaggctgaggcaggagaatcgcttgaacccgggaggtggaggttgcagtgagctgagatcacgccattgcactccagcctga[142 bp omitted]tctctactaaaaatacaaaaattagccaggcatggtgatgggcgcctgtaatcccagctactcaggaggctgacgcaggagaatcgcttgaacctgggaggcggaggttacggtgagccgagatcggccgtttcactccagcctgggcgacagagcaagactccatctcaaaaaaaaaaaaaaaaagtaaattacactacttttatgcaggacattagtttcaacaaataattagttgagcatctgtatgccagatgctgtgctagatgctgggggcgtggtagtaaacaaaacggagaaatcattacctttaagagctaacttgggagtcggaaacacagacgaaaaacataatactcctcggaattttggagattggttccaagaccgcatataccaaaatccgcgtatactcgtcccccagttgcccaacagaatccctgtataggaaaaatccgccctttgtatccgcaggtttcccatcctgcctccgcatttggtaggggttaaagaacccgcggatacggatggccaactgtattttatttttcgaaggccacttataagtggatggatgcaattcaaacccgcgttgttcgcgggtcaactgtacataagtaaattaaaccgtaagtgagtaggtaataaagcagtaaggtggattgggaatgccacccttggctgttggaatttttttcttttttttttttttaagaggaagtctcgctctgtcacccaggctgcagtgcagtggcgcgatctcggctcactgcaacctccacctttccggttcaagcgattctcctttctctgcctcccaggtagctgggattacagacgcccactactatgcctggctaaattttgtatttttagtacagatggggtttcatcatgttggccaggctggtcttaaactcctggcctcaagtgatccacctgccttgagtgtgagtcaccgcacccagccacattttaattgtttttgagagacagagtttatttatttatttaaatttatttatttacttatttatttttaaaaatagacttatttatttattttttgagacagaatcttgctctgttgcccaggctggagtacagtggcgcaattatagctcactgctgcagttgcagttgttaacaggctggcaagggaaggcttcctggggaaggtcatgtttgagagtatttggaagagctgtgggagagagttgtagggatatcagagggaaaagtgtcccaggtggaggcaacagccagtgcaaaggccctgaggcaggaggaaacgtcctggcatgttggaggaacattgaggaggcccatgtggttggagcagagagtccaaggaggacagaaggaggaggccaggggagggaggtgaaaaggtgcaggttttgcaggacccagtgcactttgagaaggacttggtcttcttctacgtgagtgaaatgagagccacggaaggctgtgcgccaaggaaagctggatctactcagcatttcccagcgtccccaccaagccctgctgtgccccctaaaactccctattcctggagaagctttggtgtgcacaggaaattcagggttctggactcagccaagtttgaatccccgcccctccacttaccagctggaaacattgggcatctcatttagccccctcataccccagt[223 bp omitted]gaggcaggagaatcgcttgaacatgggaggtggag[132 bp omitted]ccgaggccacaacaggcttggaacctgcttttacaggacctgggagaaagttgaggggagagcgggcagtttgtcttccatctctggccttggctgccctctgtaggacaacctgggaataaaacggtggaacccgggaatctaaaagtgcaaaaggccgggcaccttggcttaatgctgtaatcctagccctttggagacaggaggatcgcttgaggccagcagttccagaccagcagccttggccacttagagaggagaccccttctctgcaaaaaaaatggaaaaactagctgggcaaggtggcatgcacctgtggatctagctacttgggaggctgaggcaggattgcttgagcctggaaggtcgatgctgcagtgagctacgattgtgccactgcactccagcctgggcaacaaagtgagaccctgtctctaaaaataaataaataaatggctaggtgtggtggcttatgtaatcccagtactttgggaaaccgaagcggttgagtcacttgaggtcaggagttcaagaccagcctgggcaacatgttgaaaccctgtctctactaacaatacacaaaaattagccgggtgtggtggcaggtgcttgtaatcccagctactggagaggctgaggcatgagaatcacttgaacccgggaggcggaggttgcagtgagctgagatcgtgccactccactccagcttggacaacagagtgagctcccgtctcaaaaaaatatatatatacacataataaaaattaaaaataaatcaataaaaccagaagaaaccaaagcagtcagggtgagacttttttttttttttttgagattaagtctcgctcttgttgcccaggctagagtgcaatggcacgatctcagctcactgcgacctccgcctcctgggttcaagccattctcctgcctccgcctcctgagtagctgggattacaggcacccgccaccatgcctggctaattttgtatttttagtagagatggggtttcaccatattggccaggctggtctcgaactcctgacctcaggcaatccacccatcttggcctcccaaagtgctgggattacaggtgtgagtcaccgcgcctggccggggtgagacttcttgtccagctgggcttgtccaccatccagggatgggtactcctccctccaggggtgcctttccgttcccctctgaggttctcccacttttctttcttatcatgtcactactaccccagacagctttgaggagacaattgtcagatggcagaaactgaggcccacaaaaggcaacctgaggaatgtggcctctctctgggcctcagccttgaagaagagatctcccagggctgcctggctgtgccgtgtgataactccacctcctcagtgtaaggcaatcccagaaggcttcctgtaggaggagggctgtggattggccaatttttaagtatgatattaatatgaataaaataacatcaactgtttactaatatatataatttattattattgttattattattattattattattattatattgttgttattatttttgagacagagtctcactctgttgcccaggctggtgtgcagtggcccgatctcagctcactgcaacctccgcctgccgggttcaagcaattctgcctcagcctcccgagtagctgagactgcaggcgcatgccaccatgcttggctaattttttgtatttttagtagagacagggtttcaccacgctggacaggcttgtctggaactcctgacctcgtgacccacctgcttcagcctcccaaagtgctgggattacaggtgtgagccaccgcgcctggccattattatattattgtagtggtataatattgtttaccagtagctgaacaattactgaacactttctgggtaccaggccccattctaagccgtcttcttcttcttcttcttcttcttcttcttcttcttcttcttcttcttcttcttcttcttcttcttcttctcctccttctcctccttctcctccttctcctccttctcctccttctcctccttctcctccttctcctccttctcctccttctcctcctcctcctcctcctcctcctcctcctcctcctcctcctcctcctcctcctcctcctcctcctcctcctttcttcttcttcttcttcttcttcttctttttttttcagagacagggcccaggctggagtgggatcatagcttactgcagcctcgaactcccagggttaagtgatcttcctgtcttagggttaaatgatcttcctgtcttagcctcccaagtagctcagactacaggctcatgccactttgcctggctaaattttctatttttcctatagatgggttcttgctgtgttgcccggggtggtcttgaacttctggcctcaagcaatcaagcagaaagagttggaggccggagccaggcgcggtggctcatgcctgtaatcccagcactttgggaggtcgaggtgagcggatcatgcggtcaggagttcgagaccagcctggccaacatggcaaaaccctgtctctactaaaaatagaaaaattagccgggcatggtggtacgcacctgtagtcccagctactcaagaggctgagagaggagaatcccttgaacctgggaggtgcaggttgcaatgagccgagattatgccattgcactccagcctgggcaacagagcaagactccctctcaaaaaaaaaaaaaaaaaaagttggaggctgggtgtggtggctcacgcctgtaataccagcactttgggaggccaaggcaggcagatcacaaggtcaggagttcgagaccagcctggccaacatagtgaaacgctgtctctactaaaaatacaaaaattagccgggcatgttggcgtgcacctgtagtcctagatacttgggcagctgaggtaggagaatcactagaacctgggaggcagaggttgtggtgagccaagatcatgccactgcactccagcctgggcaacagagcaagactccgtctcaaacacacacacacacacacacacacacgcaagactccgtctcaaacacacacacacacacacacacacacacacgacaaaaattagccgagcgtggtggcacacccctgtaatcccagctatttgggaggctgaggcatgagaatcacttgaacctgggaggtggaggctgcagtgagctgagatcgggccaccgcactccagcctgggtgacagagctagactatgtattgaaaaaaaaaaaaatacctccctgactgtcccctgctcagggtgggttcagtacccactttgggctctgcagctttctttctttttctttttttttttttttttttttagacagagtctcactctgttgcctaggctggagtgcggtggtgcaatctcagctcgctgcagcctctgccaaccaggttcaagtgattctcctgcctcagcttccctagtagctgggattacaggtgcataccaccacgcccagctaatttttgtatttttagtagagatggggtttcaccatgttggccgggctggtctccaattcctggcctcacatgatccgcccacctcggcctctcaaagtgctgggattacaggcatgagccaccgcgcgtggcctgggctctgcagctttctgaatggccccccatcagggccccggcaggactggggatgcctggccacatgcccgtctttcccactggacgatgagcccagagagggtgggaaacgggcttagcttagtccctctgtgtccctagcgcccagcacagggtctggtacacaggaggtgctccgtggacacttgccgagtgaatgcgtcttaccatgactggggaaactgaggcacaggggtgcagagcctgccctagagaatcccaccttcactgaggctgagggagggggctgagggcttcccaagggccctggctcaagctattggtgtcactgtacagtgtgtggggacactgaggaatatgccccccgatcctggaccaggcctggactgtccttgactaacctggaggaggcaggatggaggttggtggtcctggggcccctgagcaggtggggagactgaggcacccaggtaggggtggagcagggcctggggactcaactggtggttctttgtttagtcgccagctggttgttctttgtctctctttctctctctctctcccccttatccttccttccttccctccctccctcctttcttttccttccttccttccttccttccttccttctttctttcttattattattactatttttcgagacggagtctcgctccatcgcccaggctggagtgcagtgccgtgatctcggctcactacaacctcctcctcccaggtttaagcgattctcctgcctcagccttctaagtagctgggctgacaggtgcccgccaccacgcccaggtaattttttgtagttttagtagagatgaagtttcaccatgttggccaggctggtctcaaactcctgacctcaagtgatccacccacttcggcctcctaaagtgctaggattacaagcatgagccgccgtgcccggccactgtttctctctttttttttagagacaggatcttgttcttccacccaggctggagtgcagtggcatgatctcggctcaatgcagcctcaacctcctgggctcaagtaatcctcccgcctcagcctcccaagtcgctgggaccgcaggcgcccaccatcatgcctggctaatttctgtattttttgtggagatagggtctcgccatgctgtcctggctggtctcaaactcctgggttcaagcaatcctcccacctcagcctcccaaactgctgggattacaggcatgagccactgtgctcaacctattcttcctgtttctaactcagaaaacatttctagttctttctgtatttccttctctctgtgaccctctcgaatctctcgaatttttctctgcatctctccctctctctctctctagttccccctccctccatgctcctcagtctctcccccactctgtgtccccctcttgccctctccgcagccctctcgcccaggccggatgggggtggcagcagcagggcaggtgcggccccgggctcagtgcccgatgctgccgcggccgccccggatttgtggctgcgactcctttatctgtggctgcagctgctccttatctcctggcttcaggacaggagcctgggattagggcagcccgggccaaggacgcgagatggcagggcaggcgggtgggcgggaggtggcagagagcgggggagccgggtgcgagcgcatgtccctgagtgtgtgtgcatgtgggagccagactgccgtggatgcatgacttgggggaggcctgtgtgtgtgccattgtgtgtctgcgtgattgtgtgtctgtctagtgtgttatgaaggtgcatgagggattgtgtatataccttggtggctgtggcctatgtatgactctgtatgtgtgtgtctgtgtgtttgtgtgtgggtatgcatgaatgttggtgccactgtgagttcctgagaagagccactcagccactgctatgtcccacacgagaccgcacaaccccagcccagctccctgcttgcacaaccttgctcctgagactctattcccctgccctggcctccttggtgggcctgatggttttcccaccttgctgacctaaggcccccagggacgggccccttgacctgcgacctgtggctgtaaatggtcctgtggggacagctgctggccctgttttcaccatcctcacctggaacgggccggccccttcctgccacccacaggccttgtgggtcccatccccgcctggcgggctcctaacccagctcccggggaccttgctccgggccagcctgacccccgcccgggagtgtgtctccagctctgtgtcctctgcctgagctgaggcctctgtgtgtgctcggcatgggttgggcctggggtgagagtgaccgttgaatcagtagccccaaaacatcgtttctggggagccctcagctgtcccagtgtcctgggtaagtccctttccctctccacgggagaatgacagcacccacctctggtaacatattacatgcccagtgctgggcacagaacaaacgtgggagccatttggcagatggggaaacagaccccataagctcagtcaccaacacactggaggctggggtggtgcccagtgtgctgggatggccagtgctccagccaggggacacagtgggcatccagccacctccacccccacagggctggtccccgggggtcctgaggtgcagcccaagcccccagaacctggcccaactcctggcgctaagatggaaacttctccagcagccaagtctgagtcttggccagcggcccccggcctcccagaacctctgccctggagtctccacccaagaacagatcactccctttgggagcagtggcctcctggggagggcagggggccagcctccgggaggacaggggtggagcgtggtacagtcatccagccccactttgcagctttttccttacttgtgaccttaggttagtggcttgacctctctgatccctgagtttcacaaccaccacgtgggcagagagcaggtggaggtggggtgagtgttgcagggagtggaggcagtgaacgagcagaactaatttccaggcaaacaccagaaagggcaggcaggctttgggatatggttttcagccaccgctgcacggttccacccctgcctcggccttgaccctgatgccagcaggcttgaatcagtcaaagaggtcagctgcctgggccagacacggtggctcatgcctgtaatccgagcactttgggaggctgaggtgggaggattgcttcagcccaggatttggagaccagcctgggcaacacagcaagaccccatctctctaaaaaattaagaaattaactgggtgcggtggtgcacatctgtagtcccagctacacggaggctgaggtaggaggatcgcttcagcccaggaggtcaaggctgcagtgagctatgatggcgccactgcacgtcggcctgggtgacaaagtgagaccctgtatccagaaagaaagaaagaaaacaaaaggtcaggtgccttcctgctcctctctgagcctcagtttccccatatctgtgctctgggaagaccacagatcctacacacaggctgcacttgaagaaagagaggctcagtacttggcgacatccggcccgccctgcggcagcccaagtctgggacaaaaaagatttaaaaataaagcattgtaaatacccttgtttcctgcaaatagagccagcctctgagttccctggcctcccgggcagccaagcccagacagtttcttggaaaggggtggaattcagagggctgttttttgttttttttttgggggggggggatcagggtctcgctctgtcacccatgctggagtgcagtggtatgatcatagctcactgcagccttgacctcctgggttggggtccttctgccccagcctcccaaatagctggaaatataggcgtgcaccaccacgcccagctaatttgaaaaaagttttattttgtaaagatgggggtctccggatgttgcccaggttggtctcgaactcctggcctccattgatcctcctgcctcagcctcctaaagccctgggatttcaggcatgagccactgcacctagctcacagaggggtgttaatggagagtcctggtccctgggttcctttctgggatagggggtggagggatcctggaggggcccgtgtgtccctgtgcacctcagttcccggctttggtgtgggtcagcgagtgtgacagggtgtctgtcaccgcctgtcacagggggtgagatagcatgtgggttggtgacagagagagtgtgcgggtgatttgggagggtgtcaggatggaaggaactgtgttcctggtgtgaccacatggggctgagcaaggcagggtctccgtgtcccccggtgcgacggggtctccaaccacgtgtgtggttgtttcagcgtgtgtgtccctgagtggaatggctgtagctgggcgtaggtcctcgcgtccccacctcctgcgccccgccccgccccctaccttggacacgcccctagcgtctccccccaatcccagaggaagaaccaactctttcaagtcgctgttgccggggcaaccgttttacaagcgtccacatggtgggcacatgtgtgtgtgtcctgcgccccatgtgtctgctcggcccccgcccccatggcccccagccgcggcggggagggggcacaggcggtgtggggtgagcgggaggcagtggaggggcagctggtgacagcttaatgatggagggctggggtgggggtgggctcctggccctgctgtgtgtgtgcaggggtggctgtgccttccagacggggcccggggtgtatgtgtgtgtctgtgtgtgtgtgtgggtgtgtgtgtgtgtactaaccagtgccaggcagcgtgggggtgtgtaaggatctgctgagagtgtgtgtgtgtgtgtgtgtgtgtgtgtgtgtcgggctgagtgaaccccgggtctgtgggcatgagtgcattcagaagggcgtggggtaaggaaggacccccgcaggagagtgtacgcgtgaccttgtgagatactcgtggaggggttgtgtcagcgtgtgtctgcgtgtgaggacccgggggtggggcggggtgtgacagtgcaggagtgtctgtgctcactagggcgtctaggtttgtgtgagaaggaaagataggccgggcgcggtggctcacgcctctaatcccagcacttcgggaggccgaagcgggcggatcacgaggttaagagatcgagaccatcctgaccaacatggtgaaaccccttctctactaaactgggcgtggtggcgcgcgcctgtagtcccagctacttgggaagctgaggcaggagaatcacatgaacccaggaggcgaaggttgcagtgagccgagattatgccattgcactccagcctgggcaacagagcaagactccgtctcaaaaaaaaaaaaaaaaaaaagagagatggcagggggggtgaccccaccgggaataaaggtttgagggtgtgtgtttgaggttagggtatgtgtgtcactgggagtgggtttctgggagtgaacatttgggaacactagtaatggcagacattgggacatcacccccaacttgccaggcttactcacttacttattcacatttactcattacttatacaagcttgttcacactcattcagtccttactagaacacagtgaagatctactagtaataccctgttacaagtggggaaactgaggcacgggggggaaggcccaaggccacacagaacacagatccctgttaacttccatcctagatctgggaacaggctgccacttctctgacataggtccgttctctcgtccccccacccacaactcacattccagcacgcaccccgcgcacgtgcacagcaccgcgtgcatcagcccgcgtgcagcaggaggcgaggctgcgtgagtgtccccatcaccgcgcgcactgcgcggccccgcaagttttacaggcgctttgtggggacgtgcatatgttggggttagggatcttctaggaaggcctaatctgcatgcgaacccccaggctgctggaatcagaaacatgcaggcagccagggccggagtgaggaggaggccccaagaacctcagcggcgggagcgagaaaccagagcacgggggctccaagaacgcaggcggcgcggggaggagtctgcagggcgggagtttttcggtcaccccgcggggcgggggcggggccgcagcagtcccagcccagctcagccatcccagtcccgtccccgagttagcccggcgccgccagggagcgctgtgggagcgcggagccgtcggggaggagcccgggtgggtttgggctcccctgcccgtgagccttggtgccaggagggggcgccggcgggagctaggagcgagaaatcccctgcagggctctgaggccgcactgggggacttactgcttgatggggggcgctgaggacagcgggtgtcgtcatccgtccgaggggaagactttgcgtctcagttccctggaagagctttcttgggagggggcttcttcagcttctggggaaggagaacctgggacgagattggagggggacaccccaatcctcagtggggtggggggagctgtatgcgggggccacagctgttggggtgtgggccatgggtcttagttcgccagaaggggtcgggggagcgtcttggagctccggatttaggcaagaggagccgtcaggggtccccggagtgaggatgggaaacagctagtttgaggggggcgccgctctgggggcttcccttgaggggcttctttagtgaagggacttcttggcgccttgttctctggaaggggacctgggacaggtttgggaggtctggcagaaaggtcagatcctcgatagaatgtggggggcgccaagggccacaggcactggcgtcgggacagctgcggctcttagacaccttcggagggggtgtcttggggtcccggctctcccgaaggggagccgtcggagtccccggggccgggggagaaagccgtctaaagggggctctgtggttggttcccgcgcctctgccacctgcgctcctccggtcccctccggcgggggcggggagggcggggagggccggggaaacccgagccaccgcccccagccccgcccccggccccgcccccggccccgcgccggccgagccgtccgcggcgggacgggcggaggcggcgggagagcgcgccctgaagccgctccgagtgcccaggtccctctcgccgccgccccggagccccgtgctgcgcgccgaggccgcctgcgccgtccgtgcgcccccgcgccccgcgccctctgagccgccggccgtccagggcacccacccccagccccagcccccgccggcccgggatggccgcagcccgcggctaagcgagcccggggggccccatgggccggcccgcgccgcaccccgcccgcggccgccccctccggcccgggccccccccgggcaccgcgggcccaggcggcccggatggcggtcgcggcggctggggcaggggctggggccgcgcggccgccactgacgggtagtccggcgcccacagcaggtaagcaaggggcaggcggggcaggtgggggggcagcagggtacgacggggacgacctgccccatggacggggcatggagggtgctgaggactccgagtagaccaggggattccctcctgcagcagaaccagcgggtgtatgagggtggggtcagagggacgacaggtcagcgcgtggggaggggcgggggcgtgaagccagatcctaagcggctctccaagcccgaatccagccgcggtgtccctgtccgacggggcgggcgcactcctgtctcctaaaacctccaagtgtgcatctgaggaacgcacggtgccctccccagaatccccttagcctctaggagggcgagacccagacagccctttagccatgtggtctccaaggggccgttggggggcttccggatcctgcagagcccgggcggggggctgccgtcgcggtccagctgcgcacagaagtaaacatctgtcagtggcgcgttccctgctcgccgccgccgccgccggggacacggtgtcctccggtgagggccgggccctctcggctcctggagcagcccgttcagccaccagagggcgtgaaaccctttggtgttgggggtgggggtcccttaagggcaaagcctggatgtgaagtggcgggaggctgtgcctgcctttcctgctttttataaaaggtgtctcctgcacggggatagccccgaattgtcccaggaggtggtttgtggattaggagttattaggcccaagggggctgcagacagattagtggggaggggggtgtgctggagagagaaatggctctcccagggtgaatgccaccactgtcccctccccagaacgcatccgacctgcccacaggcctgtgattacctgcagggctcgtcattggtccagatttggggagtggggccaggggcttaaagcaggggggtgcaggaggccggacccctgactttcctccctcttgcctgtctcccctgccctttccctgttctctacatccttgtccctgttccatggccctctttgtctgtctctgagtgccccgggctgaggaagcctgggtggggtgtgaccagcctcagaggatgtcagtgaggggcaggatcccacccacactgccagcttctcccacccccagcttcttgccttggggccctttggacacccctccctcctcccttcatcctaagactcccgaggttcatagctccggcaccgactccacccccagggagctacagaaagcttcttccaggggtgcagggaagaaaataaaacattcccctcttcagctgggtactgcatctgaaactccaccatcagcactggcccctcggcgtttcaggtcccagttttcagggagcgaacagaggagacagctttcaagagctgggcagaagggactcaaaaagtttgcagccgggcacaacacaatcaaaagattgtttcgacaaatgtgtgtcgatggcaaccgcgtggttgactggtgtcagggttgttgggtgctgtccttcaagggaggcagatttagacccagggacacagggctggggaagctcagagtggggatggagggctctacctcagggtaggaatgtcagagaagacttcctggaggaagggcctcagaggtggggctgtgaaggatgagtaggagttttctaagtgggaaaggaaaaggcattccaggtggctgtgcatgcaaagatctggaggcatggaatagtcaaggcaccttggtgagtgtgggagagactgttctagaaggttggcagaggaagaactgggctggggcactcaaggttgcatccctggaggtaggggctgaatacgcagatcagagaggtgcaagttgttaatgtatctggagtcactgggctggactatctttgctggggggctgtgggcttcctccgctgatgcatctccctggtcctccaagttgaggcagaggctctggggcctcaaggtggaggtggtggccgggggttggggtcgggagatggacaggaggctcccaaaccagccttgcacttgcagggctgataatggccttgaaggaagcctgaagaaagagtggatatgaatggggcatgcctgcaggaagggtgtctcggagatgatgatgttggaatggaggggtctccctgtcaaatccaaatgaaatcaggcttcaggtgagccctggaagaaatcagacagcaggcccagcttacagcatgtggccctcacttcccaagtggggaaactaaggcccagagagagggcactgttcgtgcttaaatagcgcagtgtgtcaggaaccaaggtacaatttgaatttggggagatggaaaagatgatggccaggtgcagtggctcatgcctgtaatcccaacactttgggaggccaaggcaggtggatcctttgagcccaggagttccagactagcctgggaaacatagcaagaccccctctctaccaaaaatgcaaaaattagccaggtgtggtggcatccccctctggtcccagctactcaggaggctggagtgggagaacttcttgagcccaggaggtcgaggccgctgtgagctgagatcgcaccactgcactccagcctgggtgacagagtgagaccccgtctcaaaagaagaaagacaagatgattgagctgacctgtttcccgggaaactgaagagtggttcccagtctcacccagtgttagggtttaaccttcatctggggtctgtgcctcagtttctctttccatcagatggccagcatcttgtggtgtcctggccgctcccggaggacccatgtcgctcaagccacccgctgggacctgtgccagctgcttagccatgccaggcctcattaggctgatcctgtcatcccaccccggggacccccctcctgccagctccagatgcctccgaggccagccctggggcagcctggccagccccaagagactggtgtggtcaaggtggcaactttatagcccaaccacagagggccggggccagaaatggtgggtctaagaagctggcacacacacgctccctagcctccctccccagacacagctgggtggcgggtacaggaagagagagctccaggtgccggtgggggactgcggggcactgaccctgcaggccacagggccctcgttacttcccgcctcatctccctgcattgtcccctggctcctggcactccagccacgctggtcatctcgaacaggcacggtcctgcctccgagcctttatacgtgcagctccctccgcctggaacactctttccagatcttcaatggtggcttttttttttttttttttgagacagtctcgctctgtcacccaggttggagtgcagtggtgcgatctcggctcactgcaagctccgcctcccgggttcacaccattctcctgcctcagcctcccgagtagctgggactacaggcgcccaccaccacgcccggctaattttttgtatttttagtaaggacggg[135 bp omitted]gtcagctcaaatgctttctcctctgagaagccctccttgactccccagtctagaagcagcctccagtcactatggcttcatcctgagttttttttttttttttttctgagacggtgttgctctgtcgcccagactagagtgcagtggcgcaatcatagctcattgcagcctccacctcctggactcaagcgatcctcttgcgtcagcttcctgagtagctgggactacaggtacatgccaccaagcccagctaattttaaaattttttgtagagacgggggtctcgctatgttgcccaggctggtctcaaaaccctgggctcaactgatcctcccgcctcagcctcccaaagtgctgggattccaagcatgagccactctgcacccagccccatcctggttttttttttgttgttgtttacatgctcttgacatctaattaccttatttcacatttattatctgtctccccgactggatggtgagtttgtcggggaggggcccagggtggccttggttaccaccgagtccctggtccccagccaggccctggcacacagtaggcgctcaataagtgtttgtcaggttaattcgtgtgctggaggcggaacccagccgggcactctgggctttctgccactggggccttttactggctggatctgctctgctgtgtgtctttaagaaaatctcgtacctccctgggtctcagcgccactgttctctcaaacagcaggtcctacgcccctctctcacctctcctcttttcctcttgttaacacaggccagcgggttcccaggcagtagttgtggagtccgggagagaacaagtttggagttggatccaggttccaatcccagctcagacacttgttacttttaattaaaaacatttttttttggccaggtgtggtggctcatgcctataatcccagcactttgggaggccgag[133 bp omitted]gaggcaggagaatggcgtgaacccggaaggcagagc[131 bp omitted]actcctggtctcaagcagtcctcccaccttcgcctcccgacatgctgtgattataggcatgagccaccacaaccggcctcagctgcttacttgctgtgtgcccttgaataagtcacttaacttctcttagcctcagtttccctacgtggaaaacagggctaataataataacatgtttttcagggactgtgggagaattaaatgtagaggaaagcactcatcacagtgtctgcctctaaataatggaatagccaacattgctggtgttgttattgttgttaggccag[136 bp omitted]atctctactaaaaatacaaaaattagctggacatggtggctcgtgcctgtaatcccagctacttgggaggctgagacaggagaatcgcttgaacccaggaggcagaggttgcactgagctgagatcgctccactgcactccagcctggcaacagagcgagactccatctcaaaaaaaaaaaagaatatataggttataggctgggcacggttgtcacacctgtaatcccagctctttgggagtctg[136 bp omitted]gaggcaggagaaccgcttgaaccccagaggtggggttgcagtgagccgagatcgtgcaactgcactccacagcgagacttttgtcttgaaaaaaagaaaaaaatagaggttttgcagccattgattggataataaaagaaaaaagaatatggagggaggagtgttggaagtgagtctttgaggaatgagtaggagtttgctgaccacctgtgttcaaatcccagctcagccacttaggttgtttgaatctgagcaagttacttcacttctctggacctcagttttccacctaccaaatggggataaaatagtccataccttgatacaagttactacatgtaaagtgcttagaatggcactaatagtgttgttcatgagtgttagtttcagttattattactattattattagagacggagtctcgccctgtcgcctaggctggagtgcactggcgcgatcttggctcactgcaacctccatgtccttggttcaagtgattctcctgcctgatcctcctgagtagctgggactggtggagtgcaccaccacacccggctaatttgttttttgttttttttttttgtattttcagtagagatggagtttcaccatgttagccaggctggtctcgaactcctggcctaaagtgatccacctgccttggcctcccaaagtgctgggattacagctgtgagccaccgcacccggcccagttattattattattattttatttatttatttttttgagacagagttcgctctgttgcccaggctggagtacagtggcgcgatcttggcccactgcaagctccgcctcttgggttcacgccattctcctgcctcagcctcccaagtagctgggactacaggcgcccaataccacgcccagc[146 bp omitted]tattattattattattttaccactattattatcatgaaggagccaccatactcctccccagaaaccactatccctgaccatccatccctcagcttcactttggcaaagacagacccagagtccctcaagacaagctcatgtgctgggacttgatgcccagggtagcaggaagccagcgatagttctagcagttgggcagcactcagcttctgtgctgggggaagaagaggagaggctggacctctttctccggcagacctggaaggggcggctgggggtgtctgtgtctgcaccccctgacacatgaagccacccctaggttggcctctggcccccgcagacgcagtatcggaaccagctgtgcttgccagatgttcctggtttgcccccagatgtgtgtcgccagttcgaggctgtcctggctgcctcatccctcccatggggtgggcccaggccctggggccctctgagggagggggcacatttttgtgggctgtggaatttgttttgtgttttgcagaatcactgagtcttgccttgagaggcccagacccctggccaagtcttgcccctcatggggcctcagtttctccaccagtggaacctcagggaactcctaggggcgatctaggaacaggagaccaggaggctgccctaggaacaggcccagctgtgagccctcgagctatcagcacttggggaaaacagaggcacaggcgcgcgaacacatgtatgccgcggcgttcacacacacaggcacttccccactggcatgttctggcttcacggcctggcatcctctacccatgggcagtggcaagagcacaagagccacttggtcaagctcttccaggtcctctctggctttcctacagtgctgggtggcacccttcgtgccctattgaagatgggaggccaggcatggtggctcacacctgtaatcacagcactttgggaggcaaagaagggaggatcgcttgaggccaggagttcgagaccagcctgggtaacatggcgagactttgtctctattaaaaaaaattttttttaatttaaaaaaaaaaacagatggaggctgggcacagtggttcatgcctataattccagcactttgggaggcagaggcgggcggatcacctgaagtgaggagtttgagaccagcctggcc[142 bp omitted]ggtggaacctcgtttctaataaaaatacaaaaaaattaaccaggcatggtggcttatggctgtaatcctacctactcgggaggctgaggcaggaaaattgcttgaacctgggaggcggaggttgcagtgagctgtgatcatgccactgcactccagcctccagcttgggcaacagagcaagactccgtctgaaaaaaaaaaaaagccaggcatggtggcgcacacctgtagtcccagttactcgggaggctgagacaggagaatcgcttgaactcgggagccagaggttgcagtgagctgagatcgcactgctgcactccaacctgtgtgacagagtgagactctgtctcaaaagacaaaatacaaaaattagccaggcatggtgacaggcatctgtagtcccagctgcttgggaggctgaggcaggagaatggcttgaacctgagaagcagaggttgcaatcagctgagataacaccattgcgctccagcctgggcaacagagccagactccgtctcaaaaaatatatatatatatggggaaactgagtcacaggaggaccaggagtgaaacggagaggaaggagaagtgtatgcagggcagcacccccacaggcaaaagtgtgcagacttgggatctgcagcaagctcacccctctgtaaactgaattctcaaagtcagccctgtgccctgcaaaaactcagccgaagatgtccctctagaaactcccatccagcaaagacagtcatgggcacagacaccacgcttacagggctgggcaagaggaaggcacccatggctgggggtggccaagatgggtagcagggaagggtttctggtggaggggctgtaggagctagggctttcagggtagagtaggagtttgccaaattaagataggccccaattccaggcctccccaagattagaagagatgcctacatggagagagggtccccctccctttcttcatctctcaggtgctactctttgagatcgggagttctgtaggacagaggcttttatccctgggactgggtgtgcccggcaggtgtcccctggggagttcggtgggaaggggagtgggggtgccagggcgttgcctgtgcataaagataatgagcaacatttcctggcatcaccaaggaaggtgccagaaacacacacccttgcgctggctgtctgttgctttggttgattggaagggcctgcctagctgtgtgacgttgggctgctctttgcctctctctgagtccatttcccttctttccccttccttccccagctgtggggattgtgtggcctccagctaaaagtggaggtctgtcctaggtccttcttgctgcacctcacactgctacgctcccagcccctccaggaaggaaggaggcttccctccctccaggcaatgcaggttctccaggatttctacgttttctccaggactgggaagggatctctagccaggccctgcacaggcaatgtagacggcacctgggatccctgcaggggtggacacgggcagtggtcagggcggggccgttccctcctgagtcccccggccccatctgcttcccctcctctcactctcctcccaccgtgtctgtgcgccctggaatctttgcagctgtgggcgttggtggcgtgttcacctgtgcacccctgtgtgtgtgtgtggccaggaggagggtcttggggaccttggccagagcacaaatgacaatggatgctcttgtgtgtgtctctgtgagaccggattaccacgtgtgagtggggaaaacctgtgtgtgtaagtgggatcatgcttgagtgtgagtgtgaaaacaccctggtttttcactgtggggttgttcaagtgtgtgtgtgtgtgtgcaaacaccagcacgtggatataacgtttcaccacaagtgtgaaagcactcaagtgtgtgagtgtgatttttttttttttttttttttggagacgaagtctcggtctgtcacccaggctggagtacagtggcgcgatctcggctcactgcaacctccaccccttgggttcaagcaattctcctgccttactcactctccctaatagctgggattacaggcgtgcactaccacacccggctaatttttgtatttttagtagagacggggtttcgccatgttggccaggctggtctcaaattcctgacctccagggatccgcctgcctcagccttccaaagtgctgggattacagacgtgagccaccgcgcccggcctgtttttttttttttttttttctttttgaaacagagactcactctattgcccaggctggagtgcaatggtgcgatctcgactcactgcaacctccttctcccgggttcaagcaattcttctgcctcagcctcctgagtagttgggattacaggtgcctgtcaccgtgcctggctaatttttgtatttttagtagagatggggttttgccatgttggccaggctggtctcgaactcctgacttcaagtgatccacccgccttggcctctcgaagtgctgggattacaggcgtgagccactgtgcctggccgatggtgtcttttaaaaatttattattttctatttttgtagagatggggtcttactatgttatccaggctggtctcgaacttccaggctcaggcgaactccccgcctcagcctcccaaagtgctgggattataggcgtgagccactgagcctggccgagtttcaccagtatttctgctaacgtcctttctctgtcccagggtccatccaggatcccagatgacatttagccatcccctttcctttggcccctccaatctgagactcctcctccatctgtctttgtccttcatgaccttgactctttttgtcttttctcttctcatcttcttttcttttcttttttcatttttgagacggagtcttgctctgtcgtccaggctggaatgcagtggtgcagtctcggctcgctgcaacctccgcctcccaggttcaagcgattctcctgcttc[137 bp omitted]tggcctcccaaagtgctgggattacagacgtgagccaccgtgccccgtcttgtcttcttttcttttctgagacagggtctccctatattgcccaggttggtctcaaactcctggcctcaagcaatcctcctgccttggcctcccaaagtgctgggatcaaaggcatgagccaccttgcccagccagtgagtgttttgaatgaaggtggaagcgtccaagtgtgtgagtgtggtcatgtttgagtgtgactgtgaaaacgccctagcatgtgagcacgacgtattcaaatgtgagtgtgagaacacactagtggattcatgcggtggtgttctggtgtgtggatgtgattgtgttagaatatgtgagcctggaaacatctgagtatgcatgggatcatgtttgggtgtaagtatgaaaatactggctgggtgcagtggatcacacctggaatcccagtgctttgggaggctgaggcgggaggattgcttgaggccaagagtttgagaccgcctgagcaacacagtgaaacccagtttctaccaaaaaacaaaaacaaaaacaaaaacaaaaatatagcgaggcatggtggcacacacctgtggtcccagctacttgggaggctgaggcaggaggatcacttgagcccaggactcagaggttgcagtgagccgaggttgcgccactgcactccagcctgggcaacagagcaagattctatcaaagaaagagagagagagggaaggaaggagggaggaaaggagtgagggagggagggaaagagagagggagagagagaaagagagaaaggaaggaaggaagggaaagagagaaagagaggaaggaaggaagggaaagagagagagaaaggaaggaagggagggagggagagagagaggaagaaaaagaaagagaaaggaaataggaaggaaggaagggagggagggagggagggaaagagaggaaggaagggagggagagagagagaaagaaaaagaagaaggcaggcaggcaggcaggcaggcgtgtgagtgtcatcatggtcaaatgtgtgattgtgtttcaatgcgtgtgaaaaagtccaagtgtgtgtgagtgtgaggacaacccaggatgtgtgtgtaaccctgtttgagtgtggaaatgtgaaaacagtgaatgtgggagtgttttgttttgtttcgtttccagacggagtcttgctctgtcaccaaggctggagtgcagtggtgtgatctcagctcactgcaacctctgcctcccgggttcaagcgattctcctgcctcagcctcccgagtagctgggattacaggcgcacactgccacacccggctaattttttttcttttttgagatggagtctcgctctgtcgctcaggctggagtgcagtggggagatctcagctcactgcaacctccacctcccaggttcaagtgagtctcctgcctcagcttcccgagtagctgagattacaggcgcccaccaccacacccggctaatttttgtatttttagtagagacagggtttcaccatgttggccaggttggtctcgaactcctgacctcaggtgatccaaccgcctcagcctcccaaagtgctgggattacaggtgtgagccactgcacccagccaaatgtgggagcgtttgagcacgcaagtgtgctcgagtgagaatgcttgagcatgtgagtgtgatcgtgtgtgggcagtgtgtgagtgtgtgagtgtgtgtatacgagtatgaaagaacctgagtgtgaggatatgagatggctgggtgtgaatgagtgtgagtgggcacacaagtgtaagcctgacagtgtgctgtgtgagatggggcatctcgctatgttgcccaggctggtcttgaactcctgggctctggcagctgtgggtgctggcagcgtgttcacctgtgtacccctgtgtgtgtggccaggatgaggggtctcagggcacagatgataacctgagctagattgcaaatgacagtgggcactcctgtacctacaaatgtgtgtctctatgcagttggacaggtacagatgcctccctaggttagggcctccgggacacaggaacacgcattgtgcacacccagccccctccccgtgccctccgccacacccacatcacccccacctggtcgcgtccgtgccagagacaaaccagttaggtggcccccgagaacagagaggcccattgttcatggctgctaatcagccctgcctgctgggccccctccgccaatggccccccgatttcctgccctccaccagagctctaggtggggagagtctgaagctccaaggcctccagggggtcctgtgaccaggccatgctggggctaggcccttggtagaaacagaccaccacagcccaagacttgttccaatccaatggggaaactgagtcacaccactccaagacttgaatgtgtgggcaagcagggtggagggggtccagagaggtccggggcccgggtaggtttcctgcctgtctccccctcctaccaccagcattcaaatgctggctctatgaccttggacaagtcacttcccacctctggacctgtttcccattcatgcagtggggataagggtattacttgcagccaggcgcagtggctcatgcctgtaatcccagcactttgggaagccaaggcaggaggctcgcttgagcccaggagttcaagaccagcctgggcaacatgatgagacatcgtctctacaaaaaatataaaaattggtcaggtgtggtggctcacgcctgtaatcccagcacttggggaggccaaagcgggtggatcacctgaggtcaggagttcaagactaacctgaccaacatggtgaaaccccatctctactaaaaatacaaaaaattagccaggcgtggtggcacatgcctgtagtcccagctacttgggaggctgaagcaggagaattgcttgaacttgggaggtggaggttgcagtgagccgagatcatgtcattgcactccagcctgggcaacaagagcaaaattccatctcaaaaataaataaaaattttaaaaaataaataaaaattggctgggtgtggtggtgcatgcctgtggtcccagttacttgggaggctgaggtgggaggatcacctgagctgggtaggttgaggctgcagtgggcgctgtgattgcaccactgtactccagcctgggcaacagagtgagatcctgtctcaagaaagaaaaaaaaaagtgggggtattacctgcttcttaggacgcttgtaaggttggaatgactatatctgtgttaagtttgtaaaatggggttggacataaagtaggtgatcattaagaataaaggggatgatggccaggcacggtggctctcgcctgtaatcccagcactttgggaggctgaggcgggtggatcacaaggtcaggagatcgagaccatcctggctaacatggtgaaaccctgtctctactaaaaatacaaaaatttagctgggcgtggtggcagacgcctgtagtcccagctactcaggaggctgaggcaggagaatggcgtgaacctgggaggcggaggttgcagtgagccaagattgtgccactgcactccagcctggg[131 bp omitted]gctaacacggtgaaaccctgtctctactaaaaatacaaaaaattagctgggtgtggtggcgggcgcctgtagtcccagctactctggaggctgaggcaggagaatcgcttgaacccaggaggcggaggttgcagtgagccgagatcgcgccactacactcagcctgggcgacagagtgagactccgtctcaaaaaaaaaaaaaaattacttagacatggtggcacattcgtttaatcccagctacttgggaggctgaggcaggagaatcgcttgaacccaggaggtggaggttacagtgagccgagatcgcaccactgtgctccacactccagcctgggcaacagagtgaaactctgtctcaagaaaaaaaaaaaaaaaaaaaaaaaaaaaaaggaataaaggggatgggtttgacatctgacaaaatgctgctgctgccatccgcttctgcaaaacctcaagaatgaaatgtccttcccatggcccacacgaggccctgcacgagctgcttcatccccttccaaacctcctctcctctctcttcccctcctcactctgctcagacacacgggcctcctcactgttcctccaacacgccacgtgtggtctgccccagggcctttgcacaggccatgcctctgcctggaacacctgcccccagattctcctatggctgacttctcacacttgggtcttagtgcatgcatcacctcctcagggagggccccctgcccacccccagtgaatctagccccattcaggacagtcatctttattatgcactgattgtatactaagcccagagacttcaactgtggtttctttttcatcctcccaataaatccatccatccatccgttcactcagacatgaaattctggaccctccaattcaggatctgggccacccagtgcctagcttttttttttttttttttttttttttttgcgacagagtttcattctgtcacccaggctggagtgcagtggtgcaatctcagctcactgcaacctccgcctcccgggttcaagcgattctcctgcctcagcctcccgagtagctgggattacaggtgtgccaccacgcccggctaatttttgtatttgtagtagagacggggtttcaccatattggccagactggtcttgaacacctgacctcaggtgatctgccctcctcagcctcccaaagtgctgggattactacaggcatgagccactgcacccgtcagcctagcttctttgtgttcattcattcattcattcatcattcagcaaatgtctatgagcgcctactctgagccactgaaccagctgggctggccctgggggagaatcgacttcccctgcaaattcactctcatcagatccccaggctggtctaggatttgtttagatgccctcacgttggggaactcattccttactaagaataaccaccaccaataccaaacagtctcaagtaccaccaatagtgctgagttctcagggtgactacagcatctgctcccaagcccagcccagcccatatggtgtgtgctgtgtcaaagaacctgggttcaaatcccatgtccttttctaacccttggacaagcccctacccattttgtgcctcggtttccctagctgtaaaatggagatagtagtgcctctcttgtgggctcagcaccaggcctgttacacagctggtgcttaataaatgtgtcctgttacttaaggtctgatatgtgtagctcctgtcgtcgccgtccatgggggtgagtggggtggggaaggggtggtttgagtttctgcacatcaggacacgaggcgcggtccatgcaaatgaaatgcaaatcccatgcaaataaatctctgggtggtgcagggcagcgtgcaaggctggaggtacaaggtgcacgcatttggggggcgcctgggaaccccatgagccgagcccaggcccggaggtgctgacccgcatccagcccggctttcagtgctcggtgtaaatgtttacacctggccggccgccaggctccacgccgccccacactaggcagccgggagggggaatgtaaactcgggctgggggccgcgggacgctcgggaggagcccagacggcgtcgagtgtggtgggcgtgtacacgtgagttattaaacaccgactgtatgcagtgaggaggatgccaccaggcactcacagcaccaagtaactggtgcccgaatgggtaaagctcagggcattcctgggggcccactagcgcccctgcaccagccagaggttgaagtgaatagggtaggcagccatggaaggctccctggaggaggcaccctccaagctgagattgcaaggggagtgagagctaggtacagtgactcacgcctgtaatcccagctctttgggaggccaaagtggaaggatagcttgagcccaggagtttgagaccagcctgggcaacgttgtgagattcccctctctattaaacaaaaacaaaaacaaaaaaaattaaaaattagccaggcacggtggctcatgcctgtagtcagtcctagctacttgggaggctgaggtgggaggatcgcttgagcctaggaggtggaggctgcagtgagctgtgatcacaccactgcactccagcctgggtgacagagcaagaccctgtctcaaaaaaaaagaaagagagagagagaaagaaagaaaggaaagaaaggaagagaaaaagaaagagagaagaaagaaagaaaaaggaaagaaagaaagagaaagagagagaggaggctgggtgcggtggctcatgcctgtaatcccagcactttgggaggccaaggtgggcggatcacttgagttcaggagcttgagaccagcatagctaacagggagaaaccctgtctctattaaaaatacaaaaattagccagtcatgctggcaggtgcctgtaatcccagctactcggggggctgaggcaggagaatcgcttgaacccgggaggcagaggttgcagtgagctgagattgcgccactgcactccagcctgagggacaagagtgagactccatctccaaaagaaaaaaagaaaaagagaaagaaaggggagtgggagtggggagggagggaagaagtgttctccatgcaaggacctatctgtgcaaaagcccagagctgggactccatgtccagggcagctctggtccattgctgcccacttctgggcctgcttatccatctggatgggaaacaggctcagagaggggcagagtcaatggaggacaccagcatgtagggaacagtgtcagccccagattcctgcctccagactgtcctaaacaccaccctccccgcgcctttgtcccacactgccacctgccgggaatgacctctcctcctttcactcttccccctggctcctcagctgcagccgctccggcctccttgctgttcctgggatacgccacactcagtctggcctcggggcctttgcactggctgtgtcccctgcctgtgatgccattctcctctgcctggccaactcctacgtttattcaagtctggaccttgtcatcggctcctcaggaaggcactccgggacccccagatgggggcggttccctgtgactcctggcacggaggccaaccccttccttgttcaatggttccttgagggaccattcccatgtgattatcgaccattcggcaggcgttcaaagtcaaaggccccacactgagtcctggcccagcgccctgtgcccgttggctgctggagggacagacggggcgtgcggctgaccatcccgtgcccgcaggctgaggatgcagcgctggaaggcggcggccttggcctcagtgctctgcagctccgtgctgtccatctggatgtgtcgagagggcctgcttctcagccaccgcctcggacctgcgctggtccccctgcaccgcctgcctcgaaccctggacgcccggattgcccgcctggcccagtgtaagctcctcctctgtgtggggtcagatacccccaacgtaaggggtagaatttcaggcagtggagtgggaggtggtgggggggtgtcataggttttttaaagatagggccagccagcccccttgcagggaggcagggacagacatcctaaaagattattcagggcaaggcatggtggcgcctgcctataatcccagcactttgggaggctgagacaggaggatctcttgagcccaggagttcatgaccagccagggcaatgtagcgagaccgccatctctacaaaaaacttcagaaattagccaggtgtagtggcgcacgcctgtagttccagctacttgggaggctgaggtgggaggatcacttgagcccaagagttcaaggctgcattgagctatgattgcaccactatactccagcctgagcaacagagcaagattctgtctcaaaacattataataataaatacattttctaaaaaaagatggggtggagggaggttgcaaattcccccaatggcctggtggagctagggtgacttctgggaactggggtctttcggctcagctgtcacaaggaattaggctctgccctgaggtcccgtgggggccagatggagattagacctgggcattcgcctggttggcccccgcggcgcagcagggggggcggtgggaggagagagaggctggatctgaggtcccagtgacctgccccaggggacagggaccaaggggaggcgggagatggagcaggagctaaaaaccggaagaaaggcccagagattcgaaggggtgaggaggggtggagagaggagagacggggctgggggcacagacacgggcaaaagtgctgctatagggacacagaaatgcccaccctgagggcaagaccctcgcccaactccccaccaatccctaatgcctgccccaccgcaggtgctgtggggtgagggtggtgcgtgggccctgacccctgtgcccacgcacatgtccatgcgtgcgcctgcgcgggcatctgaggcgtggatgccggcagggtgcgtgtgcagcgcctttgggtgtgggccacgagtacgcccatgtgcgcgtctgcgcccgcccctgccagcccacacaatcctcttttcttgtccttacaatgcacaagggtggcctccagcacgagctccacttctgtcctcccaccacttccctctctgcaagcggcgtgaagtccttcctaggactctgggacagagacccgggcgggacccccaaaatccagtgctccaggacttggggtgcggggggcaaagcacgaatggaggaatttcaggcactgcggagggtcagggcccatgggcgggtgcctgtctgccctactgcaaaaagcgagtggccactgactccccaagtccccatgttctaggctcctggtggaatttcaggctggggaccttgtgttctagcccctgtgcaagcagccagccccgctgcagggaggcagggacagacatcctaaaagatgattcattgttgccaggtgcggtggctcacgcctgtgatcccagcactttgggaggccgaggtgggcggatcacgaggtcaggagatggagaccattctggctaacactgtgaaaccctgtctctactaaaattacaaaaaaattagccgggcgtggtggcgggcgcctgtagtcccagctactcgggaggc[144 bp omitted]ttagccgggcacctgtattgtatcgggcaagcccacaaatgtctgcttcgatgcacccctctggggttgggtgtgccccctaaccccccagcacagtcctggccactccagtcctgctccggggcttaaagaacacggactaggttgctcagtcatcgcccaccccccgcaccgatttcccaccctctcagccccggccaagacagagatcatggaagcttcatgggacagacagggaaactgaggcctgaggttgcaagtggcgaaagtggcagagtcatgctctgaggctgggtttgtctcgtttctgagaccccctgtgggaacagacatctcctcccccaccaaaccccaggagacagacagcccctccttccccagggccacccagaggctcattcttttgacagccaggtgcaccagcccggggggcaggtggggactaaagatttcctctcccaaccacaagcgtgactgccacctgctctggggctgggagtcccctgcctgcaggtccgccagcagcgctgcctgtcattccagcgtctgcagttctctcccggggcttccgagtttgggggtggagccaccgcttgggtaataaatttaggctgccaggccctgggaatcggtgacttgggcacctcctggcgagtgtgggagaaagcggctggacctgggccaaacttgggtgaacgatgaaggcaggaagaatgacctttaagcccgcctctgtcgctctctctcggccacctgctaatgatgtgaccttgggatggtccgttttgtcacctgtcacatgggggtggccttgacagtagctgctgccactccatggagtggggtccccacacaggcttcggatgcagtaggctgcggtacctgctgctcctctgcattctgagaaacccaaacaccccgattcatttcttggatagggaaactgaggctccactgcacagcggggcagtggggatggagggagtctgaaaagcccggggcctcagagcagacgtcggggcctgaagagggggctctagagacctatgacaacctcactaaagagggatagggcatgggaagcagccccccagtgctgcccagagaggatgcaccagtgtcctggggcagcccagcataggggcggggtccagatagatttgcgatggaggacgaggagaatggagcagcaatggggtgagagaggggcccagaggaggtgagttagagaccccggtcagctcagctcaaggtgagacgggctggaaagcggcccagaaaggatggaccaggttctgggcagccaatataggctcagggttcagaaaggggttttggaccagcgtaggggtgtgagtgtgtacgtgccccccagtgccgcccagagagggtgcatgagcagctcagcaagagggtggggaaatttgggacctgggagtgagacgagaagccgtctaggcctggcgtcccagcaagggtcttcgtttgcaggggtacagagagggtagggggctccctcccaccccctgcacccactgaccccccctcctttctcttcctcccctcgcagaccgtgcactcctgcagggggccccggatgcgatggagctgcgcgagctgacgccctgggctgggcggcccccaggtccgcgccgtcgggcggggccccggcggcggcgcgcgcgtgcgcggttgggggcgcggccttgcgggctgcgcgagctggaggtgcgcgtgagcgagctgggcctgggctacgcgtccgacgagacggtgctgttccgctactgcgcaggcgcctgcgaggctgccgcgcgcgtctacgacctcgggctgcgacgactgcgccagcggcggcgcctgcggcgggagcgggtgcgcgcgcagccctgctgccgcccgacggcctacgaggacgaggtgtccttcctggacgcgcacagccgctaccacacggtgcacgagctgtcggcgcgcgagtgcgcctgcgtgtgaccctacctcactcggccggcgcggcggccactccccccgcctcgacggcaccactggccggccccgcgaaagactgcgcgtgcgtagagcacgccggcgcggccccgggactctcgcgataactgtactgagataaagtgtggcaactcgagctggctggtgattcatcctcggcgaggggctcgcgtgtgggccacgtcgccgtctccaccgggaaagcggggaccagtggggggggcccagctgcagggtagtgggaggatgctgtttgctttgggggaagggtagatgcaaagtgggtccagtttatggcggacaaaaaggaaaatggggtgaatggggctatgttggcagggaccgtccttcctgcctccctacgggtccctctgcccgtcccgagcgtgttccggtccgcacctcttcgctgtgtgggcttctggggaggggaaagggaagctacgctcggatgaagagaccgaggtctaggtggaccccgtttccccagcttgttcccttccgcacctctccgcggtgcgggcttctgggatgaagacactgaagtctaggtgggcccagtttccccagattgtcgctgactgcacctctcgcttctgggatgaagagactgaggtctaggtggacccagtttccccagcttgttcctgactgcacctctctgctgtgtggacttctggagagggggaaagggggagacactgtgggtgaggagcctgagatccaggtggaatcagttccccagcgtctccctgtccgcactgatcccgctatgtgggtttctaggaagggggagccactctgggggtgaggagagtgaggtccaggtggacctgggcctcccttatccgacggcctcctcgggccggtcttcgcccaccagggtgagctgaaagccactatctccttccaccagctactaaaaatacccgcacgctgcccacctcccggcggggagaggcctggggcgggcgccagccccatccagcccgaagccggcgcctgctggtgtagagctgggtccccagagacctgggtcctcggcccataaaagccctggccgggcctccacgggggggatttacgacgagcccctgcggagtatggaaaaagcccggctcggtgtttagatttccccacggtgtcaccttgatgcttggcaggcctcgggtgttgggttgccagagcgcgggaggggtcggcgggtcccacggtcggtctgaggggcggggaaggggcgggcactgcgagcccagagcaggcaccggcgaggcgagactcctcccctcctgcccctcagactgggggttcccaaggctacaacccttctccttagctgggccccctcccctccttcccacacgtctgcccttaggaccaccctctaaccacagtgtcccttcccaggctcagcccgcatccccccaccccccgcaaagctggagggcgcagatcggaaaccgcccccagggagaatcacccagccatgaaggaacatccctagcccctggctcccggggacccacagctacagctggagacactcaaggcggctaatcagcaggacttccagggagccctgagagcagggcttggcggccaggcgggtgatctgcttgggaagcagtttcagggctgccgctggctggggtccccgcctacccccgcagtcttctgactctgaggtttaaggtggtggattcctccaccctttgggccgactcagcccggcctccgcagagaggccggagttcccagacgctgcggaagcccaagtgacgcttactccgagcctcagtttccccatcctagatggcctggcctcagagaggagtgttgttcagcccaggacacacagcgagaaagctgaccatcaggggtctgccgcccccccgaagctcccctgccacagtgtgcatgtgtgtgtgagtgttgcccaccctccggggcctcccggacctcggccttcctgtctcccacccagatccagcgtcccaaccacagggcgcgggcccagcccaccagggaattggaacataaataaaccgagaagcccctgcagttccctggggctgcggttgtcatcagcgcatcggcacaccggatgagggtctctctcacacacacacacaagcacactcacaagacacagagatcaccacccataagggctcagcaggcaggacccatgatcctacacagtcaccttccacacagaattgcacactcagaaagggacactcccccctttttttttttttcttgagacagtctcactgtgtcgcccaggttggagtgcagtggtgcgatcatggctccctacaacatctgcctcctgggttcaagcgattcttgtgtctca[149 bp omitted]tggttcaagcgattctcctgcctcagcttcccaagtagctgggattacaggcatgcaccaccacgcccggcaaatttttgtatttttagtagagacgggtt[132 bp omitted]tctggaaacggtgcggtgattatctctctgcacccctcacaggcggctaacaacatcacaaacaaatcagccagaaccatcactcatgggtggggccccatgggtgccagttcccagggcccagtgccctccagggtgaggtccccagcaggtgaggctcctagcaggtgagattcagtgtggaaggtctctgggagcaggtcccagcaggtaaagtccccaacagccgaggtccccagtaggcaaagtccccaggagacatccccagcaggccaggcttccgcaggggacgctcctggaagccagcatgtgaaatcccaggtaagggacatacctggccaccgaagactccagcaggtgaggccccaggaaagtgaggacccaggtaggtgaatccccaggcaggtgaagctgcaacaggtgaccgtcccaggcaggtgagtcctcaggcaggtgaagcttcaggcaaacgagtccttaggtagatgaggcccccactcaggtgaggccccaggaaaatgaggttcctggcagcccaggccccacaccagcctctcaggtgaaccaagccgctatgccgcgtgtctggtacctggattcctcctgcagtttccagcaggccttgcagaaagcgagtgcccagctgaaggagcgaggccgcagcgtctcccgccagcgaaagtagctcaggtagcgggcgtggtccttgtccagctcctgcaggtaccgggccaggtccttggggctctggaagtcgtccacgtggatgaaggcgtcgggtggcaggaacctctcgtagttgcttctgctggggcccagcaccacgggcacggcccaggcctccagggcgttcctccacagcttctcggtgatgtagtcggggtgcaaggagttctcgaaggccagatagaacttgtaccgggacagcgtctccatcatggttccctggggcaggggcttgtgggagcgtccgtacacgtccaccttgagatgggcctgcaggctctggtagtagcgcaccctggcggagtttggcccccagttggacactgcccaggccaccagctcggtcttggccgagaggttgagcggtgggtgggcaggctggccggaccacggctccagccagccgtagggcgtgaagatgtcggagtcgctgcggtaggacatggtgagattgaagtatccgtccatggctttcagctgccagcagtggcttggggactccatgctgaaccagatccatcgctgcccctgccgcctcggggagcgtgggagctgggcactggggttgtacatgacctctcggtggtgcacgatgaccgcgtctgcctgtggatacaccttgcggtcggcagtgatgttgcagtcagccgtgccaggcaccatctctgagcagcggggcagagctatgggtttgttaaaaggccacgtccacagcaggatcagggggatggagtgggcgggggtccctgtgctgtctgggaagcgggacccattagggtacacagtgggatcgtcttgagacacacgcagataggagaagaaacacacagccatcagcagctgaaacagcagcgtggtcagacagcagcgccacgaccactgtggcttggccgggcccaggggatccatgggtcagagtatctgggaagtggggagagaggagtgagggtcattgatgacaatctcctgcttaccaaagctccaggccatgagtcctgagaagagctgttattattcctgttacacagatgagaaaactgagaccaagtgactcacagcaaaagtcagcacagctggtgtttgaacaaagggagcttggcccagagtccacttcctcccacccattagacaacaggccctttctacatgggcaagggtccctggggaagttgggagaggccccaagggccctcaggtcccaccttgatcctgtccttttctggtgtgtccccagactcttcctcaatctggagagaagacacagccgatcataaatgccccccagtgcccctgagtcgaggcttgaacccatgactctgctggggaagggcacaatgggattgggttttggaggtaatataagagctcaccagatagagtagacctgtgggaaagggtgctcctggcagaggaaaccaccattgccaaggcctagtggggagagacccctgagcagtttgcagagaaagcaaaggaagtactcagggctgccagtgtcgagttcatattagattggtgcaaaagtaattgctgtttttaccattgaaagtaatggcagccatgcgcggtggttcatgcctgtaatcccagcactttgggaagccgaggcgggcagatcacgaggtcaagagaccagcctggccaacgtggtgaaaccccatctctactaaaaatgcaaaaattggccgggcgtggtggcgtgtgcctgtaatcccagctacttgagaggctgaggcaggagaattgcttgaacctggggggtggaggttgcagtgagccgagatcgcaccgctgcactccagcctgggcaatggaattctatcttggaaaaaaaaaaaaaaagaaatattaacttgggtcaagcacggtggctcatgcctataatcctagcactttgggaggctgaaggtggatcacttgaggtcaggagttcgaggccagcctggccaacgtggtgaaacccatctttactaaaaatacaaaaattagctgggcgtggtggcgggcacctgtaatcccagctacttaggagcctgaggcaggagaatcacttgaacccgggaggaggaggttgcagggagccaagatggcaccactgcactccagcctgggacacagaatgagattccatctccaaaaaaaaaaaaaagaaagaaatattcactcggggtttcattcaataagcactcagggccgggtgcattggctcacgactgtattcccagcactttggaaggcagaggagggcggataacttgaggtcaagagtttgagaccagcgtggtcaacatggagaacccacatgtctactaaaaatacaacaattagctgggcatggtggcacatgcctgtagtcccagctactcgggagacagagacatgagcatcacttgaacctgggaagcagaggttgcattgagccaagatcacaccattgcactccaacctgggtgacagagcgagaccctgtctcaaaaagaaaaaaaaaagagagaatagaaatattcactcagggtttctttcaacaagcacccaaaggttactcctctggtaggctgacgctgggggagaggtggggacagataggagggagaataggcaggcgtggggaccgataggagggagaataggcaggcgtggggactcacatgctgaccaggagggcagtggggccacccagagacatggggaacccccaggagagaagcaggctttggtggaacttgctgagcctggcccgtcctggagatacccagcagcggactggccccagggggctggagggagacaggggagggcccaaatcccccggagtgt[223 bp omitted]ctgagccatgagaatcgcttgaacccgggaggcggaagtagtgagccacctggatcacaccactgcactccagcagcctgggcagcagagtgagacgctgtctcaacagcaacaacaaaaaaaacaaaaacaggaggaaaccttcaaagagatggtgctgtggaggaggtggcgggaaaccggggccaccttttttcatgtatggggtgagacttggaggctgggagggacccttggaccatgataaggacctgctgccgctccctggacactgctgcgtctgacaccttctgggagatgctagagggactcggggatctggagacaggcctttcttctaaaagaggatgcactggatcccgtctggatgcccgtgacactgcaaaaagccagagacataaggggactgtgtccgtgaacctcaacagagcctggccactgagcctcagctttgaaggtctgaaggtctggccaatctcactccattcctaggtccttcccgcccccatagggtgtcacagagtcctccagaccccagatcctgacctcgggaacagaaatccaagaccccagccctgcccctctctgttccttgcagccctacagctgtccattctacagatgaggaaactaaggctcagagagacacctatgtgtcctgctgagtacacacaactagagccattttgatccagaccccaaagtctccccaccttaatgtcaccccaaactcctctaggactttgcagatggagctgacatctcccgaataaccttgtcccacagaactttctgtgatgatgggccgggcttggtggctcatgcttgtaatcccagtactttgggaggctgaggtgggcggattacctgaggtcaggagttcaagaccagcctggccaacatgtctctactaaaaatacaaaaattagtcaggtatggtggcaggagcctgtaatgccagctactcgggaggctgagacaagagaattgcttgaacctgggagacagaggttgcagtgagccgagattgcaccattgccctccagcctgggtgatgagagtgaaactccgtctcaacaaaaacaaagcaactttctgtgatgacggaaatgttctctacatgcagcatcaaaattggtggccaatgagcccttcaaaagtgaccatgctgtcggaaaaacagaatagttaatgctaattttttttttcatacggagtcttgctctgtcgcccagactggagtgcagtggtgtgatcttggctcactgcaacttctacatcctgagatcaagtgattgtcgtgcctcagcctctcgagtagctgggactacaagtgtgcaccatcatgcctggctagtttttgtatttttagtagagacggagtttcactatgttggccaggctggtcttgaactcctaacctcaggtgatccacctgcctcgcctcagcctcccaaagtgctgagattacatctgtgagccactgtgcccggcctggctaatgttaattttcttttcttttcttttcttttttgagacggagtttcacttttgttgcccaggctggagtgcaatggcacgatctcagctcactgcaacctccgcctcccgggttcaagcgattctcttgcctcagcctcctgagtagctgggattagaggcacgtgccatcatgcctggctaatttttgtatttttagtagagatggggtttcaccatgttgtccaggctggtcttgaactcctgacctcaggtgatctgcctgcctcggcctcccaaagtgctaggattacaggcgtgcaccacggcgcccggcccaatgctaatttaaacttaaaaatagatactggccgggagtaatggcttacacctataatcccaatgctttgggcggctgaggtgggaggatcgcttgattccaagagtttgagaccagcctgagcagcatagcaagacctcaagacctcatctctacaacgaattttattatttattattattattttgccagacatggtggcctgtagtctcagctactcaggatgctgaggcaggaggatttctggagcccagaagttcaaggctgctgtaagccatggttgcactattgcacttctgcttagacaatagaatgagaccgtgtctcaaaataaataaataaataaataacaacaaaaaataaaaacacagaaaacaaaaaccacaaaaaagcacacaagaaacagatactcaaaaagaaaaaaagcaatgactggtattacaggcagtaattgggaaacttttgagtaccttcagaacatcttggatgggcaaatctacttcttcacctgtactttttatgtttgtttgtttgttctgagatggaatcttgctctgtcacccaggctggagcacagtggcgtgatcttggctcactgcaacctctagctcccgggctaaagtgattttcctgcctcagcctcccaagtagctgggattacaggcgccccccaccacacccaggtaatttctgtctttttagtagagatggagtttcaccatgttggccaggctggtctcgaactcctgacctcaattgacccgcccacctcagcctcccaaagtgctggggttacaggcatgagtcaccacgcccagcctcattttatggaaactaaatacagattgagtagttatgacagacattgaatgtctgaattgtcttctgagggtaaaatgcacactagattgccaagatttaggatgaaaaacagaatgtcagatatctcaataaaactttttaaaggccaggcacggtggctcatgcctgtagtcccagcactttgagaggtgg[135 bp omitted]gaggcaggaaaatggtgtgaacccgggaggcggagcttgcagtgagccaaggtcgcgccactgcactccagcctgggcaacagagcgagactctgtctcaaaaaaataaaataaaataaaataaaataaataaactgagttggtctaaaccttatggtgcatagcggagctccaggcatggtgacctaggtgtgatgagaagggattgagagcacaagcgcataccaaagttctggaaaaagactcaagagacagccctcgagggacactcagagcccggactgggagggaggttgaattttaaccaagtattcctttgtgctgtcgggctcttgggctgccagtgaaaggttaatgtttagagatacatttaatattaatatattatcatgtggcccctgggtttatggcgacctcttcctaggagacagtgaagtctttgccggtgaccttcaggaggggagattgggggaaacggggaacgggagtccaggagagagatctcacccaaggtactttccctggaaaatgatcgatccacgccacaaagatcaggatgcaaaaaaacaaagccagaaagcaaaccgcattctaagccctcttttaccaccgggagtggcagaggcagagaaaatccggggccaggaaggatgaaggggtgtaggctgctgatggggtcggggggcacgggattctaccgcagagctctgcaagagagacagacagacacccacttcctcctggtttggcaaatcagccagacctcccatatcctcagcccacctcggtgcatccagaaagacccctgcctgcgactaggggctgctggccaaatgccaggccactgcacagcctgcagaccctcccccagggatcttgtgccagcccacccgcactctgaattacagcagacaggactgaggctgaggggaggaggctcggagccaggaggcctttccctggacccatgcgatccgggttgggggtgaaagtgggacaagaggccttacctgggggggccagtgtgcagagggccctagagctgagaggccgcggacggagtaacagctggattctgaggacgtggaagaggccacaccacgcagcagaaggaaggaggaagtgtacccggagctgaaaccaggccctttccaaccaccacacctgtcatcaggtgacccagggcatcctgtcctggagcccggacatcctttgaaaacaaatcgtggggctcccctaatccccgttgcagaaccaaacagggtgaagggatttggagactcaggtcatgcatgaccttgccccacctgtggcttcaatgcgatgtggctttgagtacaaagtgaaaaggctgacctgaaccaccggttcccaaagcgggttccacagggacaccaggggttccttgggaggtgggaatgaggaagtgagcagaatttctacctttccgctttccttcccaccagatcccaccttctcactcagttggcccatcaccaaatatttcctgagcactaagtgccaggccaagggatcttgcaggaaaccggtgggcaagtcaggcaactcatgaaccttggaagggaactttcttcaattaaaattgcagccttttgaataaaaaagggatggaagggcattccagttacaaggaacaaccttcgcaaaggccctgaggcagcagaaatgcaggcatgttgaggaactgcaggaggagtctcagcaggctgggtcttcaccactggagaggaggcagagctgttgcagaggctgggccacggtcagccatagggtgttcagcaccaaggcaatagggagccatgtgaggcttcaagcagaggggttaccatgtcgatacatgttttcagatgctctcttctggtaggctgggcacaggtcccatattggtggcagaagcttcctccggtggcctcaacaagcccctctgtgtgcctcaaagccacttcctttccccacccactcctgcagggcagtgcaaagcagaagtccagggagctatgcaaacttcctggaatggagagaaatgatctggaatactggttttgagggaggatgaccttaaactctctcactcccaagctgggtgcaaaggtgaccgagctcaaagcccagcctccaagtatcacgactgccctgttctagaaatcatttctgggaggctgcatcatgctgcctgagttctactatctcagtgcccagccacgcccagaccagtgaggttctgggaggtagggatgggccagggggttggggtctcccagagctccagaagtggcaacctaattccactcatgtctcattccttgactggtgaggttgactgtaacttattaaaaaaatgacttctgggggccgggcgtggtggctcacgcctgtaatcccaacactttgggaggccgaggtgggcagatcacgagatcagaagatcaagaccatccatcctgactaacatggtgaaaccctgtctctactaaaaatacaaaaaaattagccaggcgtggtagtgggtgcctgtagtcccagctacttgggaggctgaggcaggagaatggtgtgaacccgggaggcggagct[136 bp omitted]ggaaggagaggcaggaagatcgcttgagcccaggagtctgagaccagcctagggaaaacagagatacccctatctctctcttttttttgagatggaatcttgctctgtcactcgggctggagtgcagtggcacagtctcagtttactgtaacctatgcctcccgggctcaagcgattctcatgccccagcctcccgagtagctgggactacaggcgcgtgacacggcactgggtaactttcgtatttttttaatagagctggttttcgccatgttagccaggctgatcttgacctcctgacttcaggtgatctgtctgcctcagcctcctaaagtac[132 bp omitted]ctcctgggttcacgccattctcctgccccaagtagctgggactacaggcgtccgccatcacgcccagctaatttttttttttttttttgtattttta[146 bp omitted]aggtctctagtgagggacagtagggctctagtcattccatcgatgtgatcgctgggcaaagggagggtggaggaccttgggctgacctcagggatggtgccagagagaacgtgtgctcatcctgaaactgctgtgtgacttgagaggtttcctggtcctctctgagcagggctcaccataccagtgccaggtgggacctccctgccaaggagctgagcccagagcccagagtagggtatcatgaggacctcttccctcaggctcagggcaagctaggacctgcttgaggcttgcaggggcagttaggccatctgtgcacctcgttggggtcttggccctcattggaccctccagtgccttccctggccagggctgggtgggagatggagctgccagcctgctggaaatttttctccccctggggcccagggctgggagccaagggcagctggtgcccaggaggagggagaaggccccacgggctgggcgtgccatgaaccacatgtgagatccggggcatacagggaggcaatgggggtttgagggcagtgctggggttccagagggggcaggccagagccccccaacatcggccaggtggctgggcctctgccctcgtgggacccagggagggtttccatgtccctctaagcctcagaggaaattccagaggcagagaaagagaagttgggaaagggagctcttcactctgacatcagctgaggtagaggcggagaccacaggggctccaggggcgtcagaggacagagcagcctgtccccacacctcttaccccctggggactgggcctgccccagcctgttaggaagccctggcctggcctgccgagggccccgtccccctcccaggacccgtggcttgcagccaggtggtggggagaggggcccaggtgtgtggtgtgggtggcaggtgagtgatgggcccagcaaggctggctcaggcccggggtcaccagagggtttggtagagactcttcaggccccccacaccctccccaccctatgcccctccaccctcccacctgggcctcagggaggcatcacaggcacctctgcacctccactgtacagatggggaaactgaggctcagagagcacctgggattcaccaccaccacccacgtcttggtctcccctggcaattttattttactttattttattttatatatatatattttttttgagacggagtcttgctctgtcacccaggctagaatgcagtggtgcaatcttggctcactgcaacctccacctcctgggttcaagtgattctcgtacctc[134 bp omitted]ccacctcctaaagtgctgagattacaggcgtgacccattgcacctggcctattattattgttatttttgagatggagtctcactgtgtcgcccaaaccggagtgcagtggcgccatctcagctcactgcaagctccacctcctgggttcacgccatcctcctgcctc[179 bp omitted]gccggcctattattttttatttagagacgtggtcttgctata[136 bp omitted]cccagaatatttggaatgttccagaagtcctcatttacagtcgatcccacctgtaccctataagtggtggtcctgggcttgaacttggacctgtctgaactctgagctcttaacccctgaggtgagaacctggggtgagctcttaacccatgggaccaacccctctagagtgaggagacacgtcatcatttttccttgcagtattacatctggaaaccgtgccgtgatgatctctctgcacccctcacaggcggctaacaacatcacaaacaaatcagccagaaccatcactcccgggtggggccccaagtaagccagttccccagggcccagggccctccagggtgaggtccccagcaggtgagattcagtgtggcaaggtctctgggagcaggtcccagcaggtaaagtccccgaccgccgacatcctcagtaggtgcagcctccagcagccaaggtccccagcaggtgaggtccccagcaggtgaggtccccaacaggcgaggtccccagcaggcgaggtccctagcaggcaagtcttctggaggggagaggctcctggcagccgtgaagcccagcgtgtgaggtcccaggtaagagagagggttggccacaaaggactccagcaggtgaggccccaggcagatgaggttcccggcagcccaggcaccatgccggcctctcaggtgaaccaagccgctatgctgcgcaccgtctggtacctggattcctgctgcagtttccagcaggccttgcagaaatccagtgcccagctgaaggagcgaggccgcagcgtctcccgccagcgaaagtagctcaggtagcgggcgtggtccttgtccagctcctgcaggtaccgggccaggtccttggggctctggaagtcgtccacgtggatgaaggcgtcgggtggcaggaacctctcgtagttgcttctgctggggcccagcaccacgggcacggcccaggcctccagggcgttcctccacagcttctcggtgatgtagtcggggtgcaaggagttctcgaaggccaggtagaacttgtaccgggacagcgtctccatcatggtccccttgggcaggggcttgtgggagcgtccgtacacgtccaccttgagatgagcctgcaggctctggtagtagcgcaccctggctgagtccggcttccagttggacaccgcccaggccaccagctcggtcttggccgagaggttgagcggtgggtgggcaggctggccggaccacggctccagccagccgtagggcgtgaagatgtcggagtcgctgcggtaggacatggtgagattgaagtatctgtccagggcttccaggtgctggcagttagggggtggctccaagttgaaccagatccagcgctgcccctgcggcctcggggaaggtgggaggcgtgacttagggttggacatgatatcccagtggtgcacgatgaccatgtctgcctgtgggtacaccttgcggtcggcagtgatgtggcagtcggctgtgccgggcaccatctctgaacagcgggacagagccacagggatgtggaaaggccatgtccgtagcaggatcaggagggtggggcgggtgggagtggtgtcctgtcgggaggacccactgggagccctaggggatccagtggcatcgtctcgggacacacgcaggtaggagaagaaacacacagccaccagcagctgaaatagcagtgcggccagacagcggcgccatggccattgtggcttggctgcacccaggggatccatgggtcagagtatctgggaagagaggagagaggagtgagggtcattgatgacaatctcctgcttaccaaagctccgggccatgagtcctgagaggagctgctattattcctgtttcacagatgagaaaactgagaccaagtgactcacagcaaaaatcagcacagctggtgtttgaacaaagggaccttgtcccagagtccacttccttctacctattagacaagacctttcctggaatccccgaagtcttccccagtctactgaaatacaagtgccctggaggcaggggagaaggcatagccggtcatcattgcttcccatgtcactgaggcaaggcttgaatccatgactcagccagagaaaggtacaatgggactgggttttgcaggtaatatatgagctgaccggccgagcagagtggctcacacctgtagtcccagcactttgggaggccgaggtgagcagatcacctgaggtcaggaatttaagaccagcctggccaacatgatgaaaccccatttctactaaaaatacaaaaattagctgggtgtggtggtgcacacctgtagtcccagctacttgggaggctgaggcacgagaatcacttgaacccaggaggcggaggttgcagtgagccaagatgacaccactgcattccagcctgggtgacagagggagattgtgtctcaaaaataaataaataaataatagccgggtttggtggctcatgcctgtaatcccagcactttgggaggctgaggcaggtggatcacttgaggtcaggagtttgagaccagcctggccaacatggtgaaaccctgtttctaccaaaaatacaaaaataagccgagtgtggtggctcatgcctgtaatcccagctgctcgggaggctgaggcatgagaatcacttgaacctgggaggcagaggttgcagtaagctgagatcatgccactgcactccagcctgggtgacagagcaagattccatctcaaaaataaataaataaataatttttttaaaaaaagaccagcctgggcaacatggcaaaatcccaactctactaaaaatacaaaaatttgccgggcaaggtggcatgcgcctgtagtcccagctacttgggggaattgctttagtctggaagtttgaggctgcagcaagctgtgatcatgccacttaaccccagcctgggtgatggagcaagaccttgtcttaaaaaaataaaataaaaggctgggctcggtggctcacacctgtaatcccagcactttgggaggctgaggtgggcagatcccaaggtcaggagatcgagaccatcctggctaacatggtaaaaccccgtctctactaaaaatacaaaaaattagccaagcgtgatggcgggcgcctgttgtcccagctactactggggaggctgaggcaggagaatggcgtgaacccgggaggcggagcttgcagtgagccgagatagtgccactgcattccagactgggggacagagcgagactccatctcaaaataaataaataaataaataaataaataaataaacataaggtaatacacgaaaaacttttgacttacacaccttaaatggattcactgtatgggttgcgaattatatcccgatgaaactgttttcaaatgacatggtggttgcctgctttctctgttggaccgaactggtctaagccttgcagtgtcgagcggagctccctgtaggtcacctgagtgtgacgaaaagggatcccgacgccaagacctaagttcacaccaaggttctggaaagagactcaaaacacaggccctcaggggacagcctgagcccagagtgggagggaagttgaactttgaccaattactgctttgcacccttgggctctggggcctcaggcacgaggtaaatttttataatgtaactgatattaagatggaattacgtcagccctggatatatggcagcctctcctaggagacaatgaagtctttgtcagtgaccttcaggagggtagattgggggaaacaggtgattggtgggggcgattttcaggcctctgagcccaagctaagccatcatatcccctacgaccggctcatatacgttcaaatggcctgaagcaactgaagatctacaaaagaagtgaaaatagccttagctgatgacattccaccattgtgatctgtttctgccccaccctaactgatcaatatactttgtaatctcccccacccttaagaaggttctttgtaggccgggcacggtggcccaagcctgtaatcctagctctttgggaggccgaggcgggcagatcacgaggtcagaagatcaagaccatcctggctaacacggtgaaaccctgtctctactaaaaatacaaaaaaaaattagctgggcgtagtggcgggcgcctgtggtcccagctactccggaggctgaggcaggagaatggcttgaactcgggaggcggagcttgcagtgagccgagaaagagccactgcactccagcctgggcgacagagccagactccgtctcaaaaaaaaaaaaaaaaaggttctttgtaattctccccacccttgagaatgtactttgtgagatccacccctgcccacagaacattgctcctaactccaccgcctatcccaaaacctataagaaccaatgataatcccactaccctttgatgactctctttttggactcagcccgcctgcacccaggtgaaataaacagcctcgttgctcacacaaagcctgtttggtggtctcttcacacggacgcatgagacatttggtgccgaagacccgggtcagcgggactccttcgggacagcagtcccctgtcctcaccttcactccctgaagagatccacctacaacctcaggtccgcagaccaaccagcccaaggaacatctcactgattttaaattgggtaagtggcctcttttactccttctccaacctctctcactatccctcaacctctttctcctttcaatcttggcaccatccttcaatctctcccttctcttaatttaaattcctttcattttctggtatagacaaaggagacacattttatccgtggacccaaaactctggcgccggtcacggacttgggaaggcagccttcccttggtgtttaatcattgtggggacgactgcctgattattcacccacattccatttgtgtctgatctccgcggggacacctgccttggtcattcacccacatcccttggtggcaagtcaattgcagggacgcctgctttggctgctcaccttaccccttctctccgtgtctctaccccttctctactttcctgaggggcaagcaccccccaccccgtttccattttcctggggggcaagcacctcccatcccttctccactttcctgggggataagcatcccccaccccttctctccgtgtctctacccttctctttaaacttgcctacttcactatgggcaaccttccaccctccattcctccttcctctcccttagcctgtgttctcaagaacttaaaacctcttcaactctcgcctgacctaaaacctaaatgtcttattttcttctgcaatgccgcttgaccccaatacaaaccagacagtggttccaaatagccaaaaaatggcactttcaatttttccatcctacaagatctaaataattcttgtcataaaatgggcaaatggtctgaggtgcctgacgttcaggcattcttttatacatcggtccctccctagtctctgttcccaatgcagttcatcccaaatcttccttctttccctcctgcctgtcccctcagttccaaccccaagcgttgctgagtcttgaatcttccttttctacaaacccatctgacttctcccctccttcccaggctgctcctcaccaggccgagctaggtcccaattcttcctcagcctctgctcctccaccctataatccttttattacctcccctcctcacacccagtccagcttacagtttctttccgtgactagccctcctccatctgcccaacagtttcctcttaaagaggtggctggagctaaaggcacagtcaaggttaatgctcctttttctttatccgacctctcccagatcagttagcgtttaggctctttttcatcaaatataaaacccagcccagttcatggcccatttggcagcaatcctgagatgttttacagccctagaccctgaaaggtcacaatgccgtcttattctcaaaatgcattttattttattacccaatctgctcctgacattaaataaagctccaaaaattaaattccggccctcataccccacaacaggacttaattaacctcgccttcaaggtgtacaataataagagtagaggcagccacgtagcaatgtatttctgagttgcaattccttgcctccaccgtgagacaaaccccagccacatctccagaacacaagaactccaaacgcctgaaccgcagctgccaggggttcctccagaacctcctcccccaggagcttgctacaagttttggaaatctggccaccgggccaaggaatgcccgcagcccgggattcctcctaagccatgtcccatctgtgaaggacccccaatgaaaatcagactgttcaactcacctggcagccactcttttgtttagtttctcagttcatacaaaaccgcatccaggccatcaccaataattctatacgacaaacactccttctaacaaccccacaatatcaccccttaccccaaaatcttccttcagcttaatctctcccactctaggttcccacaccaacccctaatcccgctcgaagcagccctgagaaacatcgcccattatctctccataccaccccaaaaaattgttgccaccccaacactttaccactatttcgttttatttttcttattaatataagaagacaggaatgtcaggcctctgagcccaagctaagccatcatatccccagtgacctgctcgtatacatctagatggcctgaagcaactgaagatccacaaaaaaagtgaaaatagccttaactgatgacattccaccattgatttgtttctgccctaccctaactgatcaatgtactttgtaatctccccccaacccttaagaaggttctctgtaattctccccacccttgagaatgtactttatgagattcaccctctgcctgcaaaacattgctcctaactccactgcctatcccaaaacctataagaacaatgataatcccaccaccgttgctgactcctttttcggactcagcctgcctgcacccaggtgaaataaacagccttgttgctcacacaaagcctgtttggtggtctcttcacacagacatgtgagatcgcgatgaggactgagatcccaccccagttgaacccaagatattttttcctagaaaaagattaaaaaatgctactctgctgagacatcacaaagatcaggaagcaaaaagcaaaaaaatagctgggcgtggtggctcatgcctgtaatcccagtagtttcggagagtgaggtgggcagatctcttgagcccaggaattcaagacctgcctgattggccgggtgcaatggctcatggctgtaatgccagtacttgcggaggctgaggtgggcaggtcacctgaggtcaagagtttgagaccacccttggcaacatggtgaaatcttgtctctactaaaaataaaaaattagccaggtgtggtggcaggcaccttaatcccagctactcaggaggctgaggcacaagaattgcttgaacgagggaggcagaggt[137 bp omitted]aaaattaaaaagtatccaggtgaggtggcacacacctgtagtcccagctactccagagcctgaggcaggagggtcactcgagcccaggagtctgaggctgcagtgagccatgattgcatcactgcactccagcctgggcaacagaccaagattctgtctcaaagaaaaagaaaaaaaaaatgcatcttaagtccaccccaggcagggcagggccagagagaatccaaggccagaaaagatgagtggggggaggctgttgatggggttggggtgcagaggggactccactccagagctctgccagagagagagacaaacgtcactctttccttccggtttggcaaatcacccagaaccttccatgtcctccccaacggtggtgcatgccacacccagaaagacccctgcctgtgactagggggtgctggccacattccaggtcatggacagtttggtgactctccaccgggattttgtgccagcccagccacatcatgaatcagggcccataggatgggggccgaggggaggagggacggagccaggaagcctttcctgggaggtctcccaggcattctgggtggggggaaaaggtagaatgggataacttacctggagaggcagcgagcagtggatgaggacagctcaccaggaggccatggcaggtttcctggggcggggaggaagtgggaacagagaagaggaggaacaagtacgtgtacattgcagcacacacctgtcaccaggtgacctagggtgttctcccctgcagcagggatattgtctggaagccagtttccggggtgtcctaatctcgcctgtgagaccggataagggtgcaggaacttggaggcccgggacgtgacccgggctccatctgtagcctgaaggctgcctggctttgggtgcacagctggtccatccataaagtgaaaacgctggtctaaagctttgattctcaaagtgggtcccacgggggccccatgggtttctcgggagatggtaaagggagagaagtgagcagaattttaaccatcccacccattcagtcagtcaatcaacaaacattgcttatgcacctattgcataccagacccagggagagtgcagggagcaagtgggtgaatcagacaatacatgacttttgtaagggaacaattcttcaggcctctgagcccaagctaagccaccatctcccctgtgacctgcacgtgtacatccagatggcctgaagcaactgaagatccagaaaaaaagtgaaaatagccagttcctgccttaactgatgacattccaccattgcgatttgttcctgcctcaccctaactgatcaattgactttgtgacaatacaccacccccttgcaataatgtactttgtgatattcccccgcccttgtgaacatactttgtacaatataccctcgtcacccttgagaaggtgctttgtaatatcctcctccctgcccttaagaaggcactttgtaatattctccccctccagcccttaagaagatactttgtaatattctcctcacccttgagaatgtactttgtaagatctaccacctgcccgcaaaaaattgctcctaactccactgcctatcccaaacctataagaactaatgataatcccaccaccctttgctaactctcttttcggactcagcccgcctgcacccaggtgattaaaaagctttattgctcacacgaagcctgtttggtagactctcttcacacgggcgagtgtgacatttggtgccgaagacccaggacaggaggactcctttgggagaccggtctcctgtcctcgccctcactccgtgaggagatccacctgcaacctcaggtcctcagaccaaccagccgaaggaacatctcaccaatttcaaatggggtaagcagtcttttcactctcttctccagcctctctcgctacgcttcaatctccctgtccttccaattccagttatttttcctctgtagtagagacaaaggagacacattttatccgtgaacccaaaactccggcgctggtcacggacttggaaagacggtcttcccttggtgtttaatcactgcagggacgcctgccctgatcattcacccacattccattggtgtctgatcaccgcgggggacgcctgccttgctcatcacccacattcccttggtggcaagtcaattgcggggacacctgctttggctgctcaccccccaaagccccacttctccgtgtctctacctttctacgggcaaccttccgccctccattcccccttctcccttagcctgtgttctcaagaacttaaaacctgttcaactcacacctgacctaaaaacctaactgccttattttgcaatactgctaggccccaatacaaactcgacaacggttccaaatggccagaaaacggcacttttgatttctccactttacaagacctagatgatttttgttgaaacatgggcaaatggtccgaggtgcctgacgtccaggcattcttttttttttttttgagacggagtctcgctctgtcacccaggctggagtgcagtggcgcgatctcggctcactgcaagctccgcctcccgggttcacgccattctcctgcctcagcctcctgagtagctgggactacaggcgcccgccaccatgcccagctaattttttttatttttagtagagacggggtttcactgtgttagccaggatggtctcgatctcctgaccttgtgatccgcccaccttggcctcccaaagtgctgggattacaggtgtgagccgccatgcccggccgcgtccaggcattcttttacacactggtccctccctagtctctgctcccaatgcgactcgtcccaaatctttcttctttctctcctgtctgttccttcagtctgcaccccaagctctgagtcctttgaatcctccttttctacgaacccatctgacctctcccctcctccccaggctgctccttgccaggcagagccaggtcccaattcttcctcaacctccgctcccccaccctataatccttctatcacctcccctcctcacacccggtctggcttacagtttcgttccgtgacacagccctcccccacctgcccaacaatttcctcttagagaggtggctggagctgaaggcataggcaaggttaatgctcctttttctttagctgacctctctcaaatcagttagcatttaggctcttttccatcaaatataaaaacccggcccagttcatggcccatttggcaacaaccctgagatgctttaccaccctagacccagagggaccagaagaccgtcttattctcaatatgcagtttatcactcaatccgctcctaacattagaaaaaactccaaaaattagattccagccctcgaaccccacaacaggacttaattaaccttgccttcaaggtatacaataataaaaaagatacagccaagtggcaacgtatttctgagttgtaattacttgcctccgctgagagagaaacgccagccacatctccagaacatgagaacttcaaaacgcctaaaccacatctgccaggcattcctccaggacctcctgccccaggatcttgcttcaagtgccggaaatctggccactgggccaaggaatgcccgcagcctgggattcctcctaagccgtgtcccatctgtgcaggaccccactggaaatcagaccgtccaactagcctggcagccactcccagagcccctggaactctggccccaggctctctgactgactccttttcagatcttctcagcttagcggctgaagactgatgctgcctggtcgcctcggaagccccctggaccatcatggacgccgagcttcgggtaactctcacagtggagggtaaggccatcccctgtttaattgatatgggagctacccatccacattacctttcttttttttttgagacagagtctctctctgtcacccaggctggagtgcaacggagcaatctcggctcactgcaacctccacctcccgggttcaagggattctcctgcctcagcctctcgagtagctgggattacagatgcccgccaccacacccggctaatttttgtatttttagtagagatggggt[141 bp omitted]cccccataactgttgtgggtattgacagccaagattcaaaaccccttaaaactcccccactctggtgccaacttggacaacattcatttatgcactctttcttagttatccccacctgcccagttctgttattaggccgagacattttaaccaaattgtcttcttccctgaccattcctggactatagccacatctcattgccgcccttcttcccaaaccaaagcgtccttcgtgtcttcctcttgtatccctcccaccttcacccacagggaggggacacccctactccctccccggcaaccaatcacacgcccgttactatcccattaaaacctaatcacccttaccccgctcaatgccagtatcccatcccacaacaggctttaagggaactaaagcctattatccctcgcctgctacagcatgggcttctaaagcctataaactctccttacaattcccccattttacctgtccaaaaactggtcaagtcttacaggttagttcaggatctgcaccttatcaacaaaattgtttttcctatccaccctgtggggaccaacccgtacactcttttgtcctcaataccttcctacacaactcactattcagttcttgatcttaaagatgcttttttcaccattcccctgcacccctcatcccagcctctttttgcttttacctgggctgaccctgacacccatcagtcccagcagcttacctgggctgtactgccacaaggcttcagagacagccctcattacttcagccaagctctttctcatgatttactttctttccacccctttgcttctcaccttattcaatattttgatgaccttctactttatagcccctcctgcaaatcttcccaacaggacaccctcctgctcctccaacatctattcttaaagggatattgcgtatccccctccaaagccctgatttcttcctcatccgttacctacctcagcataattcttcatgaaaacacacgtgttctccctgccgatcatgtccggctgatctctcaaaccccaacccctcctacaaagcaaaaactctttccttcctgggcatggttgggtacttttgcctttggatacctggttttgccatcctaacaaaaccattatataaactcacaaagggaaatctagctgatcccatagatcctaaatcctttccccactcctctttccgttccttgaaaacagctatagagactgctcccacactagctctccctgacttagcccaaccctttttccttacacacagccgaagtgctgggctgtgtggtcagaattcttatacaagagccaagactgtgccctgcagcctttctatccaaacgacctgaccttactgttttaggctggccctcatgtctacatgtggcagcagccaccactttaatacttctggaagccctcaaaatcacaggccaggctccacttgccctctacagttctcacaaccttcaagcgttaatatcctcctcacacctttcacacctactgtctgcccctcgactcctccagctctgttcactgtttactgaaaccccaacagtaactattgcctatgggcccgatttcaacccagcttctcacttaacacccaacacaagtcctgaaccacatgactgtgtttccctaatacacatagcatcttccccctttcctcagatttctattcttccaattccaaacccaggccacacttggtttatcgatggcagtgcttctaaacccaatcaattttcaccagctaaagctggatatgatgtcttgtcccacacctttattatcgaagctgctgcacttcctccctccaccacttcccaacaagccaaactaattgctttaactcgtgcgctctctcttgctaacagaatgcacattaacatttacactgactccaatatgctttccacatcctccataaccatgctgccctctgggctgaaagaggcttccttaccacacaaggctcttccatgatcaatgcctccctaataaaggccctccttaaggttgctctcccgccggccatggctgcagtcattcattgtaaaggacaccagaaacctactgatcttattgcaaaaggaaatgcctatgtcgacaggacagcaaaagaaatagccaatgcctccacacctgccaatattccagcccccgctccagagggccagtatttttccacaaaagaagtgaaaatagccagttcctgccttaactgatgacatcccaccattgtgattggttcctgcctcaccctaattgatcaattgactttgtgacaatacaccctccctgcccttaagaaggtactttgtaatatcctccccctgcccttaagaaggtactttgtaatattctccccgcccatgagaatgtacttcgtaagatccaacccctgcccgcaaaaaattcctcctaactccaccgcctatcccaaccctataagaactaatgataatcccaccaccctttgctaactctcttttcggactcagcccgcctgcacccaggtgattaaaaagctttattgctcacacacagcctgtttggtgactttcttcgcaccgacgtgcgtgacacaatgtttgcagaatatgaaggtggctgtcacgtggtctgggcttcctggaggtttgagctgggagctgaagccccgtaggagttctgtaagtcaaaagggaagagaagagcattccacgtagagaaaagaatctgtgctccaggcgcggtggctcacgattgtaatctcagcacttggtgtcaggcctctgagcccaggctaagccattgtatatcccccgtgacctgcatgtatacatccagatggcctgaagcagctgaagaaccacaagagaagtgaaaatagccagttcctgccttaactgatgtcattccaccattgtgatttgttcctgtcccacctttactgatcaattaactttgtgacatttcttctcctggacaatgagtctcatgatctccctacccagcaccttgtgacccctgcccctgcccgcaagagataaccatctttaactgtaactttccactacctacctaaatcctgtaaaaactgacccaccccctatctccctttgctgactcctttttcggactcagcccgcctgcacccaggtgattaaaaagctttattgttcacatgaagcctgtttggtggtctcttcacacagacacgcatgacattttgggaggctgaggcgggtggatcacctgtagtcaggagtttgagaccagcctggccaacatggtgaaaccctgtctctactaaaaatacaaaaattagccgggcgcagtggtgggcacctgtaatcccagctactcagtaggctgaggcaagagaatcgcttgaatccaggaggaggagattgcagtgagccgagatcatgccactgccatccagcctgggtgacagagacgctgtctcaaaaaaaaagaatctgtgcaaagcagaggtccaggcgcattagaggagctgaaggaaactctaggctgggtcttcacaagcggaagatgagacagtgctgcttctggggctgagccacatccagccatggtcaatggtggcatgtttagcaccagggtgataggaagccgtgcaaagcttcaagcagtggggttgctttttttttttttttttgacacagaatctcactctgtcgcccaggctggaactgcaatggcatgaccatgactcgctgcagcctccacctcccaggctcaagcgatcctcctgcctcaggctcccgagtagctagggctacagccatgtgccactatgcctggctaatatggtttattttttgtagagacgaggtctcgctatgttgcccaggctggtttcaaactcctgagctcaagcaatctgcccgcctcagcctcccaaagcactgggattacaggcgtgagccactgcgctcggccatttttcttttcttttttttttttttttgagacaaggtctcactctcatccaggctacagttcagtgtggcgatcatagctcactgcagcctctaactcctgggctcaaatgatcctcctgccttagcctccctggttgctagcagtacaggcgtgcaccaccacgttaatttttaattttttttttttgagatggagtcttgctctgtcttccaggctagagtacagtggtgcaatattggctcctccgcctcctgggttcaagcgattctcctgcctcagcctcttgagtagctgggactacaggcacatgcaaccacgcctggctaatttttgtatttttagtagagatggggtttcaccatgttggccaggctggtcttgaactcctggcttcaagtgatcctcccacctcaatctcccaaatccctgggattacaagcgtgagccaccgcacccagccaggttaccatattaatatgtggtttgagatgctttatcaggacatgctgggcacaggccatcgggacagagcagaggagagcggggaggaagaggaggctgttttcaggtgtcctggcaagcggtgagggtcctctgccccagagcggtg[132 bp omitted]ccaacatggtgaaaccccatccccaccaaaaaaaaaaaaaaaaaaatacaaaaattagccaggtgcggtagcaggaacctgtaattccagctacttgggaggctaagacaggagaatcacttgagaccgggaggcgggggttgtagtgagccaagattgcgccactgcactctagcctgggagacagagcaagactccgtctcacaaaaacaaaacaaaacaaaaaacaaaagccctccctttccccaccctctcctgtaaatcacaggagaagtccagggagccagataagcttcctggaatggagaagagaaatgatctggaaggctgtccttgagacaggatggccttcaactctgtcagtcccaaactgggtgcaggggcgaccgaatctaaggtccagcctccatgtatgatgtcttccctgttctagaaatcatttccaggaggctgcttcacgctgcctggggttccaccatctcagtgcccagccaggcccaagacagtggggaagattgaggggacagggctgggccagggactggagtctcccaggcaggccatttccagaaggggtgacctaagtctgctctctgctcatgtcctcgctgggggcattctctgtgactgattaaaacaacttgtggggttatcagtcttggtatcactttgtcctggtgttagaggaaaggggttccaatcagaccccaagagagggttctgggatctcacgtaagaaacaattcagggctagtccctagagtaaagtgaaagcaagtttattaggaaagtaaaggaataaaagaatggctactccatagagtagccctgagggccgctggttgcccgtttatggttatttctttttttctttttttgagacggagtctcactctatcgcccaggctggctggagtgcagtggtaggatctcagctcactgcaacctccacctcctgggttgaagcgattctcgtgcctcagactcctgagtagctgggactacaggcgtgcgccacctcgcccagctaatttttgtatttttagtagagatggggtttcaccatgttggccaggctggtctcgaactcctgacctcaggtaatccacccaccttggcttcccaaagtgctggaattacaggagtgagcaaccacacctggcctgaaccaccgtgcccagctggttatttcttgatgatatgctaaacaacggggagattactcatgcctcccctttttagaccacatagggtaacttcctgatgttgccatggcatctgtaaactgtcctggtgctgctgggagtgtggcagtgaggatgccctgaggtcactctcatcaccatcttggtttgggtgggctttgaggatgccctgaggtcactctcatcaccatcttggtttgggtgggctttgaggatgccctgaggtcactctcatcgccatcttggtttgggtgggctttgaggatgccctgaggtcactctcatcgccatcttggtttgggtgggctttcaccggcttctcaactgcaacctgttttaccaccaagggctttatgacctgtatcttgcgccgacctcctgtctcatcctgtgacttagaatgacttaaccacctgggaattcagcccagtgggtctgagcctcattttacccagctcctattcaagatggagttgctctggttcacatgcctccgagagtggagccccagccaagcccggatgggcaaggcttccgccccacacagctgtcctgtggatgtgaagacaggtcctgagagagggtgttcattgctgagtcacttggagtttccaaggtagcaggctgtctccagctggacaactgcgctctctgccccctgcctcctgcctagttcccgttcttcagggcttaggtgcagacagctcccctaggaagcctccacagatagcggccctcttccagccagatcaattccttccactggctcctgcaactgcctctgtctcccctgtcctagctcaggccacactgtgtcccttctttcccctgctgggctggcagcctcgtgaggacagaaaacctagaagagcaagagatgagggaagctggagtgagaaacccgagggtaggtctctagcggagggccacaggactctgcccattccacagttgtgatcaccaggcaatgggaggctgggctggctgaggcaatggtgctcctcctgcctcaggcaatggcaatgggggccaagtccacactccaggctgagctccaatcacacctgaggccagactctgcctaagccccaacagcaagaaagtagaggttggtaaatgctttcttgggtcattttttttttttttttttttgagacagttttgctctgtcgcccaggctggagtgcagtggcacgatcttggctcactgcaagctccgtctcccgggatcacgccattctcctgcctcagcctcccaagtagctgggactacaggcgcccgccaccacacctggctaattttttgtatttttttgtaatagagacggggtttcaccgtgtta[131 bp omitted]cacatctgccctttcctgcgtgtcctgtccctctacagggactggaaatgaatcccatgcttttttttttttttttggacagagtctcgcactgttggagtgccgtcgcccagtctcagctcactgcaatctctgcctcccaggttcaagtgatcctcctgcctcagccccccaaggagctgggactacaggcacatgccaccacgtccggctaatttttgtaattttagtagacacggagtttctccatgttggtcaggctggtctcaaactcctgacctcaagtgatccgcccacctcagccttccaaagtgctgggattacaggtatgagccaccgtgcccggccacatgctccttttgacagagcagggcagaagacagattcctggtgaggtcaccccaccccactcaaatgtggtcattaccgcactggcactgtcacccgtggagcccctgccctgtccccaagatccgccctggcagctcacggcccacatctgattggccctcaccctgaatcacttcttgtgtcctttgaactggttccctcctcctgtaacatccaaccccagtccaccttgttcatgtagccaggagttgggagggctgcgggtggggattgggattgcaacccaggccccttggccatcagatccacaactggactagcctccagccactgagatctggaagaggagctgcggcgaattgccagagacagtgtgtgcttatcttgaaattgctgtgtgacctgagagattccctggccctctctgagcagggctcatcaggctagtgccaggtgaggtctccctgtcaaacagctgagcccagagcccagattgggggatcacgaggacctcctcgttggggtctctgccctcatcagaccccccagctcctccctcagcctgggctgggtgggtgatggagcagctgccagcctgctggaaatttttctccccgtggggcccagggctgggagccaagggcagctgccgctcagaaggagggagaaggccccacgggctgagctgggtgcgccatgaaccacatgtgagatccggggcatacagggaggcaatgggggttgggagccatcctggggttccagagtgggcaggccagggtcccccaacgttggccaggtggctgggcctctgcccttgtgggacccaaggagggtttccatgtccctctaagtctcagaggaaattccagagggagagaaagagaagttgggaaagggagctgttcactctgacatcagctcaggtagaggtggagaccatgggggctccaggggcgtcaggggacagagcagcctgtccccactccaactccttacccccagcggactggccccacaccaccctgttaggaagacctggcctggcctcccgtgagcccctgatcccctcctgggacccctgacttgcagccaggcagtggagagaggggcccaggtgtgtggtgtgggtggcaggtgagtgatgggcccatcgaggctggctcaggcccggagtcacaagggggtttgacagagactctccagtcccctcacaccttccccaccctatgcccctccaccctcccacctgggcctgggggagccatcacaggcacctctgaggcatgtccactgtgcagatggggaaagtgaggctcagatagcaccggggagtcaccaccaccctccaccaccaggtcccccatggcattctccagagagcagcaatttcccccaagcccagaatgttccagaatgttctggaatgttccagacgtcctcatttacagtcagaagccacctgcagcccctaagtggtggagcagggctctatgcagggcttgccagattttggagttcttgacctgagatcttcagaaaaccgactttcgcctctggcagctgtgtggccttgggtgagttcctcaacttctctgggcatcagccacctcctctacagagtggagccactgccggcaccttcttcaggaggctgaggtcatgctgatcctcccaccacccccgcagggtctctgcgtacccccctgcagggaggaatgtttggcctgggtccctggccctctgtgggcctcagtttcccctcctgtaatacttttaagaagcccacctctccctgcccatccacaaggccacacacacggtcacagccacttgcagacacagcttaagagtcccacatgtgtccccacacagcccacttcaccacacccaaggacacaggtccatgcagacacagccttgcgcagttacacagagacacacacagacttggagagcccagcacactcagaggggccgctgctccgtccaacactcaaagcctcactcccaggccacacattccgtctcacactcacaatcaccgccacctacgagcacccacatagagccacaggcaggcatcgagacacatctgcaggcactatcagagtcacgctgaggtcacagccacagtgatgcgttggtgacacccacccgctggcggtcacaccgagtgtcccccagccaagtgcacaccactgctgacggtcacacacataccctttgccctcctccttaggggaccctgcccttccctgacctgccctgcacaccttgggcaacacatccagctcccctggaccccgtaccctgggcagagagggtccctttatcccagccctgcccaccttcactcctggagagcgtgggccccactcctcagccctcagagcctgcatgtccactgtgcaaatggggagattgaggctcagagagcacctggaattcactaccaccttccaccaccaggttccccttggcattctccagagagcagcaatttcccccaaggccagaatgttccagaatgttctggaatattctggacatcctcatttacagtcagaaaccacctgcagcccctaagtcatggagcagggctctatgcagggcttgcctgactttggagttcttgacctgagaccttcagaaaaaagactttcacttctgggtgggtgccagagcccaccccagggagccagctgaaggagaggacccccgagggatctgaacgcctcccccaagaggcttgacctccagggtcatagaaagttctagaacagggttttctgcccctggacatttggaaccatcattgttggttgtaagggccccgactcgtgcattgtagggggtttggagtaaccctggcctctacccactaggtgacctcatcctcctcccctggttgtgacaactgaaaatgtctccagacattgccaagtgcccttggggacagaatcgccctgcgtgagaaccactgttctagagtgaggggggacacaggagctttccttgaagcattctcgcctgaaaatgttaacagcattatctgtttgcacccctcatgggtggttaacaacagcaataaaaccacaagcaaaccagcctgcaccatcgcccgggggcagggcctcaagggcacccgttctcagggcccagtgccctccagggtgaggcatcgcaacacatccacaggcactatcagagtcacgccgaggtcacacccatagtgatgcatttgtgacacccatccgctggcggtcaaaccgagtgtcccccagccatgtgcacaccactgctgatggtcacacacatacccttcgccctcctccttaggggaccctgcccttccctgacctgccctgcacaccttgggcaacacatccagctcccttgggccctgtgcctcccagcgggtgaggctcctagcaggtgacattcagtgtggcaaggtctctgggagcaggtcccagcaggtaaagtccccaacagccgagatcctcagtaggtgcagcctccagaaagcaaggtccccagtaggcaccatccccagccccagctggcaaggtccccagcaggggaggctcctggcagtgaagcccggcaagtgaaatcccaggtaagtcacatgcctggccaccaaagactccagcaggtgaggccccaggcaggtgagaccccaggcagccgaggccccaggcagccgaggccccaggtaggtaaatcccccgactagtgagaccctaggtaggtgaggccctgggaaagtgaggtcccggcagcccaggccccatgccggcctctcaggtgaaccaagccgctatgctgcgcaccgtctggtacctagattcctgctgcagcttccagcaggccttgcagaaagccagtgcccagctgaaggagcgaggccgcagcgtctcccgccagtgaaagtagctcaggtagcgggcgtggtccttgtccagctcctgcaggtaccgggccaggtccttggggctctggaagtcgtccacgtggatgaaggcgtcgggtggcaggaacctctcgtagttgcttctgctggggcccagcaccacgggcacggcccaggcctccagggcgttcctccacagcttctcggtgatgtagtcggggtgcaaggagttctcgaaggccagatagaacttgtaccgggacagcgtctccatcatggtccccttgggcaggggcttgtgggagcgtccgtacacgtccaccttgagatgagcctgcaggctctggtagtagcgcaccctggccgagtccggcttccagttggacaccgcccaggccaccagctcggtcttggccgagaggttgagcggtgggtgggcaggctggccggaccacggctccagccagccgtagggcgtgaagatgtcggagtcgctgcggtaggacatggtgagattgaagtatccgtccagggcttccaggtgccggcagttgctgggggactccatgctgaaccagatccagcgctgcccctgcggcctggtggggggcgggaggttggcactggggttgtacatgatatcccagtggtgcacgatgaccgcgtctgcctgtgggtacacactggagtcggcagtgatgttgcagtcggccgcgccgggcaccatctctgagcagcggggcagagccacgggtgtgttaaaaggccacgtccacagcaggatcagtagggtggggtgggcaggggtcgccatgctgtcctggcagcgggacccattgggagccccggtgacaggttccactgccataagccctggcctaggggatccagtggcatcgtctcgggacacacgcaggtaggagaagaaacacacagccaccagcagctgaaacagcagcccggccagacagcggcgccacagccactgtggcttggctgggcccaggggatccatgggtcagagtagctgggaagagaggagagaggagtgagggtcattaaggaagatcacccacttcctggccacgtgtcctgagagaagctgttataatttatgacacagcttgtcataaatgcccccagtacccctgagttgaggattgaatttataactctgacagggaagggtacgatgggattaggttttgcaggtaacataagagttctccagataaggtaggagttgagggaaagggtgtccgttggatgaggaaagagccagtgccaaagcctggcggggtgagacacctgagcagtttgcagacaaagaaaaggaagtgctcagggcttccagtttaggcttgattttctattcacttggtctttcaatcaacagacactcaaagttaacccctctggccctcagacacactgtccccgtcctgggggagaggctgaggctggggagaggtggggaggataggagggagaatgggcaggtgtgaagactcaggagaggcaggggctgaccaggcagggagtggggggatctggggccccagggaggagcaggctttcagggaagacatggaaccccgcttgttctggagacacccagcacggaactggagggagcccagggccctcagagtgtaggcactgggtctgggaagcctgagaagaaaaaccttcaaagaggctaagagggcgaccggaggaggaggagggaacccgaaccatgctttgtgatgggtgaggtgaggcttggatgccagggtggactgtttacagttttaaatgtacatctaaaaactgaacagcatatttaaaaaaaattttataggccaggcgtgagggctcatgcctgtaatcccagcattttgggaggccaaggcgggcagatcacctgaggtcaggagttcaagaccagcctggccaacatggcaagactctgtctctactaaaaaatacaaaaattagccggatgtggtggtggtgcctgtaatcccagctacttgggaggctgaggcaggaaaatcacttgaaatgagcggagatcacaccactgaacgccagcctgggtgacagaatgagactctgtctcaaataataacaataataaatttataacacagcatcttcctctgtcacccaggctggagtgcagtagcatgatctcagcttactgaagcctcaacctcccaggttcaaatgatcctcccacctcagcctccagaagagctgggattacaggcaagcgccaccatgcccagctaatttttttttttttagacggagtctccctctgtcgcccaggctagagtgcagtggcatgatctcggctcactgcaagctccacctcccgggttcatgccattctcctgcctcagcctcccaagtagctgggactacaggtgcccgctaccatgcccggctaatttttttttgtttttagtagagatggggtttcaccatgttagccaggatagtctccatctgacctcgtgatccgcctgcctgggcctcccaaagtgctgggattacaggtgtgagccaccatgcccagccttttttttttttttttttttttaaatttacttttgagacttggctcactgcaacctctgcctcccagattcaagtgattcttgtccctcagcctcctgagtagctgggatgacaggtgggtaccaccatgcccggctaatttttgtatttttagtagagacagggtttc[132 bp omitted]aacagtattgttttggtagaaaccatgtcaccattgctacccaaaatttagtgcctaaaaagagaggtgcttatggtgtcaaatttccatacgattgttatttcttagtatgaaagaaaggatgtgaagtagctcattaatgattttctacattaattacatattgaaataacgctttggatgtattgggtgaaataaaatatatcattaaaattaaattggccggatgtggtgcctcacgtctgtaataccagcaatattgggtggatcacctgaggtcaggagttcgaggccagcctggctaacatggcgaaaccctgtttctactaaaaatacaaaaaattagccaggtgctggcacatgcctataatcccagctactcgggaggctgaggcagaattgcttgaacccgggaggcgggggttgcagtgagctgagattgcgccactgcactccagcttggacaacaaaagctaaactccatctcaaaaaaaaaaaaaaaaaaaaagaaaaagaaaaacattaaatttcctggtattcttttttaatgtggttgctgggaagttttctttctttctttctttttaaaattattattattttttgagatggagtcaccgtgagccactgtgcctggcctattgctgggaaattgtaaattacattcggggtagaaaacagtttggtgcttccttgaaaagcctgagagatacttatcacatcaccagcaatctccctcctaggtagaagccccaaagaattaacaacaaaaggacgcaaacagatacttgtacacccatggtcacagcagcctgactcacaacagaacaaacagcccaaaggtagaaactacccagatgtccatcaatagaagaacaaatatacctagtgtgatccatccac[131 bp omitted]aacccagtctctatggaaaatacaaaaaaattagctgggcatggtggtgggcgccagtagtcccagctacttgggaagctgaggcaggagaatggtgtgaacccaggaggcggaactggcagtgggccgagattgtgccactgcactccagcctgggtgacagagtgaggctccgtctcaaaaaaaaagagaaaacctgtctctactaaagatataaaaaaaagagccggcatggtggcacatgcctgtaatcccagctacttgggaggctgaggcaggagaattgcttgaacccgggaggcagagcttatagtgaaccaagattgcgccactgcactccagcctgggcaacagggcaagactctgtctcaaaaaaaagaaaaggagcgaggctcccacacaggccacagcgtggatgaaggctgaggacatcacattcaatgacagaagccagacacaaaatgccacacagtgtgtgatcccatttctgggaaatgtccaggacgagccgatccacagagacaggaagtagaacagaggtgactggaggctggagaggggagaatgtttgtttaacgggtccagagtttctgtttggggtgatgaaagttttggaaagatgctggagtgatggttgcacaacactgcacgcgatgccactgaattgtatgcttaaaaatgcctaaatgcgccaggtgcggtggctcacgcctgtcatcccagcactttgggaggctgaggcgggaggatcacctgaggtcaggagttcgagacaagcctggccaacatggtgaaaccccgtctctactaaaaatataaaaattagctgggcatggtggtgcacacctgtaatcccagctactcaagaggctgaggcagaagactcacttcaacccaggaggcagaggctgcagtgagcaacaagagcaaaactctctctcataaaaaaaaaaaaaaagcctaaatggtgaagtttatgttatacatatatgtatggatatatggaattacaatttaaaaataaggtggctgggcgcggtggctcacacctgtaatcccagcactttgggaggccaaggcgggcggatcaccaggtcaggagattgagaccatcctgactaacatggtgaaaccccacctctactaaaaatacaaaaagaaattagccaggcgtggtggcgggcgcctgtagtcccagctacttgagaggctgaggcaggagaatggtgtgaacccgggaggcggagcttgcagtgagctgagatagcaccactgcactccagcctgggcgacagagtgagactccgtctcaaaaaaaaaaaaaggtaacacaccaaaaaccattgacttatttacttgtacaccttaagttggctcactgtatggtatgtgaattacatcctgatgaaaccgtttatttatttttgagactgagtcttgctctgttgcccaggctggagtgcagtggcacaatctcagttcactgcaacctccacctctgcgttcaagtgattctcctgcctt[135 bp omitted]ggcctcccaaagtgctgggattacaggcataagccaccacgcccagccgatgaagctgttttaaaatgatgtagggttgccagctttctctgttgggccaagttggtcttaaccttgcagcaggtgacctgggtgtgatgaagtgatccagacacccagtcccaagctcatgccaaggttctggaaagagattcaaaacacaagccctcagggcacagtccgagcccagagtgggagggaggttgaactttgaccaattactgctttgtaccattggactctagagcctcaggcacaggttaatttttatttttaagacggagtctcgctctgttgcccaggctggagtgcagtggcactatcttggctcactgcaagctccgcctcctgggttcacgccattctcctgcctcagcctcccgagtagctgggactacagggcccggctaattttttgtattttagtagagacgggatttcaccgtgttagccaggatgctcttgatctcctgacctcatgatccgcccgcctcggcctcccaaagtgctaggattacaggtgtgagccactgcgcccagccaggcacaggttaatttttataaagtaattgatattaagatggaattacatgggccctgggttcatggcagcccctcttaggagacagtgaagtatattttaacgaggtatagaagggtagattggggccaggtgtggtgggtcacacctgtaatcctagcactttgggaggccaaggacagagaattgcttgaacttgggaggtggaggttgcagtgagctgagatcacaccactgcacaggagcctgggcaacagagcgagacgacatctcaattttaaaaaaaaaaaaaaaaaaaaaaaaaaaaagaagggtagattggggaaaatgggtaattcaggggtggtcagggctgaggtcccacccaagttgaacccaagatatttttttctagaaaaagaatgcctgggctggacacagtggctcatgcctgtaatcccagcactttgggaggctgaggcgggtggaccacctgaggtcaggagttcaagaccagcctggccaacatggtgaaaccccgtctttactaaaaataaaaaaaaaaattagccaggcatggtggtgggcacctgtaatcccagctactcaggaagctgaggccagagaattgcttgaatcagggaggtggaggttgcagtgagccaagatggcgccactgtactccaacctgggtgacagagtgagactccgtcccccccaaaaaaagcatgcccagttcctcctggtttggcgaatcagccagaaccttccatcccctcctccatcccactacatgcagcacccagaaagacccctgcctgcgactagggcctgctggccaaattccaggccactgcacagcctgcagacccttctccggggattctgtgcccatccagctgcatcctgaatcacagcagacaggaccggcgctgaggtgggaacaaacggagccaggacgcctttcctacgaggtctcccgtgatttctgggttggggataaaggtgccccaagactctctccctggatggcgggggcagcatgcccaggatgagagcacctcccaggaggctgaggacagagtaccagctggattctcaggacgtggaagaggccagaccaggtagcagcaggaaggaggaagtatacctggagctgaagccaggctctgtccaaccactgcacctgccatcaggtgacccagtgtgtcctgtcctggagctgggacatcctctgaaagcaaattgtgtgtctcctctaatccctgctgtagaattggaaagggtgcagggatttggaggcctaggtcatgaccctggtcctaccggtggcctcaatgcaatgcggctttgagcacaaagggaaaaggctgacctgaaccactggttcccaaagtgggttccatagggacaccaggggttccttgggaggtgggaatggggaagtgagcagaatttccaccttcccgccttccttcccaccagatcccacctccc[132 bp omitted]gaaaccccatgtctactaaaaaaaaaaaaaaaaaaattagccgggcatggtggtgcatgcctgtaatcccaggtactcaggaggctgaggcatgagaatcacttgaacccaggaggcaaaggctgcagtgagctgagatcaagccactgcactccagcctgggcaacagagcaagactctgtctcacaaaaaaaacacagaaccacaaatatttcctaagcacttactaagtgccaggccaagcactcctgcaaggagctggagggtgagtcaccgacaatacgcgagccttataagggaactaacaattaaaactgtggccttctaaacaaaacggggagggaaaagcattctgggtagagggaacaacctatgcaaaggccccgagggagcagaggtccaggcacgttggaggaactggggggagtctcagcaggctgggtcttcaccatgggagaagaggcagagctgtcgcagaggccaggccacggtcagccatggggtgttcagcaccagggcaatagggagccattggaggcttcaagcagaggggttaccatgttgatgtgtggtttgagatgctctcttttcttttttgagatagccttgctctgttgcccaggctggagtgcaggttggcgtgcagtggcatgatcttggctcactgtagcctctgcctcctgggttcaagagattcacctgtctcagcctcaggagcagggattacaagtacccgccaccatgcccacctaatttttgtatttttactagagatggggattcaccatgttggccaggctggtctcgaactcctgacctcaagtgatcagcccacctcagcctcccaaagtgctgggattacaggcgggagcccccacacccgtcctgagatgctctcttctgacacactaggcacaggccccactctggtggcctcaccaagcccttctgtgtgcctcaaagccactccctttccccgcccactcctgcagggcagtgtagaagtccaaggagccaggtaagtttcctggaatgcagaagagaaaggatgtggaaggatgtctttgacagaggatgtccttaaactctgtcactcccaagctgggtacagaggtgacagagcccacatttcaccttcaggtatcacgacttccctgttctagaaataatttccaggaggccgtttcatgctgccccagactttcaccgtctcagttcccagccaggcccaggccagtggggaggatcgactggccagggctgggccagggactgcggtctcccaggcaagccatttccagaagggatgacctgagtctgttctctgttcatgtcctcgctgggggcattgtctgtgactgattaaaacataactcatagaagttgggtatagtggctcacactcataattccagcactttgggaggccgaggtgagcagatcacctgaggtcaggagtttgagaccagcctggccaacatggtgaaacctcgtctctgctaaaaatacaaaaattagccgggtgtggtggtgcacacctgtaatcccagctactctggaagctgaggcgggagaatcacttgaacccgggaggcagaggtttgcagtgagctaagattgggtcactgcactccagcctgggtgacagagtgagactccatcacaaaaagaaaaaaacccaaaaaaacataactcatggggctctcagtcttggtgtgactttgtcctggagccccagccaagcctggaccggcaacgcttccatcccacacagctgtcctgtggatgtgaagacaggtcctgagagagggcgctcactactcaagtcactgggagtctcaatcgcaccaggctgtcttcagttggacagctgtactctctgccccctgcctcctgcttaattcccagtcatccttcagggctcggtgaaaacagctcctccagggagcctccccagataggggctctcttgccctcccagccagatcatcctttctactggctcctccaaccacccgtgcccctgattctaggctcaggccgcgaggatctcttccctctggctcagatgagctgagacttgcttggggggtgcggtgaggccatctgtgcccctcgttggggtcctggtcttcattggacaccccagctcctccctcagcctgggctgggtgggtgataaagctgtcagcctgctggaaatttctctccccttggggcctaagggctgggagccaagggcagctgccgctcaggaggagggagaaggccccataggctgggctgggtgcaccatgaaccacatgtgagatctggggcacatggggagacaatggggggttgagggcagtgctggtgttccagagggggcaggccagggtcccccaatgttggccaggtggctggtcttctgcccttgtggaacccaaggagggtttccatgtccctctaagcctcagaggaaattccagagggagagaaagagaagttgggaaagggagctgttcactctgacatcagctcagggagaggcggagaccacgggggctccaggggcatcaggggacagagcagcctgtccccacacctcttaccccctggggactgggcctgccccagcctgttaggaagccctggcctggcctgccgagggccccatccccctcccaggacccctggcttgcagccaggtggtggggagaggggcccaggtgggtggtgtgtgtggcaggtgagtgatgggcccagcaaggctggctcaggcccggagtcaccagggggcttagcagagactcttcaggccccccacaccttccccaccctatgcccctccacccttctacctgggcctgggggagccatcacaggcacctctgcatgtccactgtacagatggggaaaccgaggcttagatagcacctgggagtcaccaccaccctgcaccaccaggtcccccatggcattctccagagagcagcaatttcccccaacactagaatgttccagatatcctcacttacagtcagaagccacctgcagcccctaagtggtggagcagggctctatgggggacttgcctgactttggagttcttgaccctgagatcttcagaaaaccgactttcacctctggcagctgtgtggccttggatgagttcctcaacttctctgggcgtcagccacctcctctgtagagtggagccactgccggcaccttcttcaggaggttgaggtgacctggaaggtcacgctgatcctcccaccgccccacagggtctctgcgtaccccctctacaggctggaatgtttggcctgggtccctggccctctgcgggcctcggtttcccctcctgtaatacttgtaagaactcagcctctccctgctcatctacatggtgctggggccactaaacagacagggagtgcgggaagccccaggtgacggtgacagaaacctggcaccccctagaaacctgaccctggcctcacccccgggtcccctggcaccaacacgctgaggtctgcccacccctggtacccaggcccagctgggttcatgcagcttaaatttcagcctgtggtgggtgaagaggcgggggctggacacgcttcattttccaatttctagaaataaaagctgtggggccatctattgtggagtggaaataaagcccattgcaaaaccttgtgtgtgaaaaaataacaatagcatttacctccctgcccggggagagaaaattccagggaatacatggggccggggaacaaagaggcctttctctcattctggaaaggttttgtgaagtgtgcgagtggcaattttagaatcagaaaagctaatggaggtattttctttctttctttctttctgagactgagtcttgctccatcgcccaggctggagtgctgtggtgcgatctcgactcactgcaacctcccactaccgagttcaagcaattctcatgcctcagcctcccgagtagctgggattacagatgcccgccaccacgcccagctaaattttgtattttaagtagagatggtgtttcactatgttggccaggctgttctcgaactccggacctcaagtgatctgcccgcctcggcatcccaaagtgctgagattacaggcgtgagccaccacacccggcccaatgaaggtatttccgagaacgaaaacggttaggaggtggtctgttggaacctggaggtgaaaagtataattttctttcctttttttttttttttccagacggagtctccctctgtcgcctgcccaggctggagtgcagtggcacaatctcagcccactgcaacctccgcctcctgggttcaagtgattctcctgtctcagcctcccgagtagctggaattacaggcacgcgccacgacgcctagctaattttttgtatttttagtagagatggggtttcaccgtgttagccaggatggtctcaatctcctgacctcgtgatcagtctgtcttggcctcccaaagtgctaggattacagcagtgagccaccgcaccgggccaaaaagcataattttcttggtttgttttcaggcgatgttttcaaggtttctaagcacctgtctctccatcggcaaaaattacagccagtagagccagcgacctgggcacctgggccagccctgcagggagtgtatggagatgccactcaccttgggaagatgcaccaggagttacggtccactctgtccctgttggcgttctctgaagagtagaaattttcccctacccagactctgagaatgttccaaagacctcaatttatatttggtatccacctgcagccactcagtccctcagcccagctgtagcctctggtcactccccctcccagagggagacagtgttgagatttgacttcagaacaagggcagagccttacaaaaaatgagctgggcatggtggtgggtgcctgtaatcccagctactcatgaggatgaggcaggagaatcacctgaacccaggaggtggaggttggaggtggaggttgcagtaagatgagatcacgccactgctctccagtctgggcgacggagcaaaactctgtctcactca[134 bp omitted]cagtgaaaccctgtctctactcaaaatagaaaaattagctgggcgggatggtgagcgcctgtaatcccagctacttgggaggctgaggctcaagaattgcacgaacctgggaggcggaggttgcagtgagctgagatcgcgccactgcactacagcctgggcaagagactccgtctcaaaaaaaaaaaaaaaaaaaaaattggtgaggcgcggtggctcaggcctataatcccagcactttgggaggtcaaggtggggggacttcctgaagttgggagtttgagaccagttgaggtctttggaacattctgagactccgggtagggaaaaatttctatcctccagggtactccaacagggagggagaggactgcaaattctggcgcatctcttcccaaggtggcgtctccatacactccccgcaacatggagaaaccctctctctactaaaaatacaaaattagccgggcgtggtggtgcacgcctgtaatcccagctactcaggagactgaggcaggagaatcacttgaacccgggaggtggaggttgtggtgagccgagattgtgccattgcactccagcctgggcaacaagagtgaaattccgtctcaaaaaaaaaaaagatcttgtttatttcttggtttgtcagtgtcttccccagattgggcggctcatggggcagggcttgggtccccagtatgacctggcacccagtaggcactcagtaaacaggtgctgaataaatgtccttgtctgtgatggaagcttgaactcccacttggagaattataaacgaagactgaagatctttggactctggggcaggagtgaccctccccctgccccttccccaccccccaccgaccaccccagagattacagcctgcctcaggggaatctgcaggtgaggtagtcctcacccccagtgacacagggcaggacctcgcagggctggagatggaggaggccgggtggcaggcacaggcaggcaaagaatgctgccgcagacgagaatgaataaacaggctccttggatgtcagaggctgggggtggggggacactttgaacctcacgcctggctggggatgtttggacaaggcaggcggccagcgggtgtcatcagggctaaaattaacctccacttcccgctcagcccctccccctgggccaggagggaggctggggccccggccatcacttaagtgagcgctgtatgccggacaaagctccttgaagaaatcaatgcacgtggtcctctcaacaaccccgacagctgctatcagtaatggcattgtgatttatccccattttgcaggtgaggaaaccaaggcaccgagaaaaagggaggctgatagccacaaaactcaaaagcagcagagtcaggactcgaacctgggattcagggagtgtgttctcacctggaggtctccctgaaagccaggggagatgaaagagaccctgagcgatgagtccttggcggaggcgggcatgcggcccctcattcactctcccctagggacctctccagaggtttccagagttacagtaactttgggtctttttgtgcaaattccaagagatgcctgctgtgccagtgacctgctggggacctaaaacaccctcattgagccagggaagggtcaaggagggggcggggacagggctggtgggctgtggaaacctcgtgcagatggtgagatattaaaatacatccactccacaaaaattagctgggcgtggtgacgtgcatctgtaatcccagctactcaggaggctgaggtagaag[146 bp omitted]catgcctataatcccagcactttgggaggctgaggcatgagaatcgcttgaacctgggaggtggaggttgcagtgagccaggatcgcgccaccggactccagcatgggcaacagaacaaaactccatctcaaaaaaaaaaaaaaaaaaaaggaatgaatgatgctgtaagtatatcccaagaattgcatgggatatacttacgccaagccgtgattcatgatctatctgaaatccaaacttaactggatgtcttggatttttatttgctaactctgatgacttcagctgggtgggggtggggggcagtccctgtagcgggcaggtgctaagagcaaaggcaggcattaaggaggtgaaatcagagccacaccaggcgctcaggtggcttccaggacgcgacgccttcctaatgggcttcccaggtgcctccgggaccagccagatggaggaggcttcggggcctccctggccctcacccgctgggccagcccctcatcaccacctcccaggtccctcctgccaggctcattattcatctttaacggtcactcggcagggggagtgtgggctgggaacacctgggactcccaggcttgcagtgggcggcctcactaatgggggtgaggcccccattagagaggcagtaatgggtgggaaaggggtcccggcccaccaaggagctggcctggggcaggaagcatccaatttggggcaggggcgggaaacagacttctgccacccccaccctgccatttcctttcctgtcgaggcaggagtccagggaagcacctctggatgccttcacccttcccaatctccacctggacggggtcctgctgggccccccagacgcagagggggctgctctggcactcctgcctccccatatccaggcaggggtaggatggatgccccagccttgaccttccagcttcccatctgccagacttgctcaagagagtggctcacggctaaggagtggaaactgacacccagagaaggatctagaacctcgtactcttccatgctcttagccactcccctttctgtctctcctctgagctatcacacatgttgttcctctctcttgggcactctagcctggatgacaaagggggatcctgtctcttaaaaaacaaacaaacagacaaggctgggtgcggtgactaacatctgtaatcccagcactttgggaggccaaggcgggcagatcacgaggtcaagagatcgagaccatcctggccaaactggaaaaaccccatctctactaaaaatacaaaaattaactgggtgtgatggcacacacctgtagtcccagctactcaggaggtggaggttgcagtgagccgagatcacgccattgcactccggcctggtcaacagagtgagattctgcctca[132 bp omitted]caacatggagaaacaccatctctactaaaaaatacaaaattagccaggcatggtggcgcatgcctgtaatcccagctactcacgagtctgaggcaggagaatcgcttgaacccaggaggcagaggttgcggtgagctgagatcgcaccattgcactccagcctgggcgacaagaatgaaactctgtctcaaaaaagaaaaaaaaaaaaagaaaaaaaatgtccctacacccctattagaatggccaaatccaaagccctgccaacagcaaccccaaatgccccgaacccctgaggacagggagcaacagggagtgtcattcattgccggtgagaatgcagaatggtacagccgctttggaacagtttggcagtttcttataaaactaaacatactcttaggatgagacctagaaatggtactcctaggtatttacccaaaggagctgaaaacctaacatccacacaaaaacctgcacacagatgtttacagcagcattattcacagttgccaagattgggaagcagccaagatgtccttcagcaggagaatgggtaagaacactgtggtgtgctcagatgacaaaattttattcaggctgggcacggtggctcacggctgtaatcctagcactttgggaggcaggggcgggcagattacctaaggtcaggagttcgagaccagcctggtcaacatggggaaaccctgtctctactaaaaatacaaaaattagctgggcgtggcggcacgaacctgtagtcccagctattcaggaggcaggagaatctcttgaacccaagcagacattgcagtgagctgagatcgcgccactgcactccagcctgggtgaaagaggaagactccatctatatctatatctatatatctatatctatatctatataaaatataaaattcagtgctaaaaagaaatgagctgtcaagccatgaaaagacacagaggaaccttaaatgcattttttttttgagacggagtttcgctcttgttgcccaggctggagtgcagtggcacaatcttggctcactgcaaactctcccccactccctgggttcaagcgattctcctgcctcaacctcctgagtagctgagataacaggcgctggccaccacacctggctaatttttgtatatttagtagagatggggttttatcatcttggccaggctggtctcaaactcctgacttcaggcctccctccgcctgccaaggtgctgggattacaggcgtgagccaacacgcccagcccttcaatgcatattactgagtgaaagaagcccatttgaaaaggtgacacactgtatgattctagctacagaatattcccgaaagaggaaaactatggagacggtgaaaaggtcagtggctgtcaggggctgggggaggaagggacgaacaggcagagcacagtggatttttagggtagtgaaactactctgcatgatactgttaaatggtagacatatgtcattacacattcatccaaacccacagaacatatgcatacaacaccaagagtgaaccctcatgtcaactatgaactttttttttttttttagatggagttttgctctgtcgcccaggctggagtgcaatggcctgatctcagctcactgcaacctccacctcccaggttcaagtgattcttctgtttcagcctcccaagtagctgggattacaggcatgcgccaccatgcccggctaattttttgtatttttagtagagatggggtttcaccac[306 bp omitted]aggcaggacgatggtgtgaacagggaaggcggagcttgcagtgagccaagattgtgccactgcactccagcctgggtgacagagtgagactccgtctcaaaaaaaaaaaaaaaaatttcttcattgctgcccggtgtatagtagcagaagactggaggccaggacatgtgctttcaccagaacaatggtccagcctcaagatggaatattacactgtccttacaaaagagggggaagttctgcactcgaagaaaagatccgagatgcattgttaggagtcaactacgctgagctgcaagaaagtacggggagtgtgatgttgtttccgtggggaaaagaaaatatacagacatgcttgttttggcgtggaacatggctggaaggagaaacaagaaaccgactaatggcctctggggatggcgtggggcttggggagtggctggtatttattctaaacaccctctagaatcttttgaattctatggcatgcgtctgtcttacctctaaaagaaggaggataaactgt[213 bp omitted]aag[139 bp omitted]gactttggatgggtttgaaaaggctggggtggcaggggtggtggctctagatttcaggccaggccatcgctctgcctgctgcccctcagtttgggctgaatcccccaccaggccccccaacgaggccccccagagccctgctcttgtcctggctcacacctttcctactctggttcagcgagggttcagaccagtggggacccctggaaggtgagatgtgggctgggctggggccagggacagggccaggcctgccggagccccttgcagctcggcccgaccacccagctttccaggaagcccgaggggaggcttggctggctcagaggaaggacctgtgtgcgccaatggtggggctgggggccaaaccaggcccctctgagcgcccacgctctgaggaggaccacagcaagtggagggaggctggctagaaaagagatacacagggaggaaggcccgagcttccctatgcctcagtttccccataggccaaatggctcgctggctgtgtggcccttgtggacacaggggatgcctgagatgatgtgggaccagggaactatggctccactgggtcctagccttggacgccaagccagataggataagggggggcaagtcccgccctgacttctggagccctgaagtaatgactaacccggctttaggctttaaggctggggcctcctaccagaacacagccaggagagagtcacgtcctctttcctaagatctctacccctgtctactccctcttcctccctctgtgctctgctggggaccctgtgggtacagggatgtggcacccccaaggcattcagggctctgggcctctctttttttagagacagggtctcgctctgtcacccaggctggagtgcggtggcaggatcatagcttactgcagcctcgaactcctgggctcaagcgattctcctaccttagcctcctaagtagctgggactacaggtgtgtaccaccatgcctggctccagccccctttttggctcttttgggggtaccctagtgggccagtgttggtcccaggggtctttgtcaggacaagggaaatgtttggcccagaagtgcctgtctatggtttaagcaagatctgcagctggccacagtgactcccgcctgtaatcccagcactttgggaggctgaagcaggagggtcacttgaggccgggagttcaagaccagcctggacaacacagtgagactccatctctacaaaaaatttagaaattagccaggtgtgttggtgcatgcctgtagtcccagcttcttggaagctgaggcagaagaatcgtttgagcccaggagtttgaggttgcagtaagctatgatctcaccactgcactccaatctgggcaacagggcaagaccttgtcttcttcttattttttgagatggagttttgctcttgtcactcaggctggagtgcagtggctcgatctcagctcactgcaacctccacctcctgggttcaagtgtttctcctgccttagtctcctgagtagctggtattacaggctcacaccacgatgcctagctgattttcatttatttatttatttattttgtttatttttttttggagatggagtcttgctctatcactcaggctggagtgcagtgacgcaatctcggctcactgcaacctccgcctctcaggttcaagcgattctcatgtctcagcctcccaagtagctgggattacaggcacctgccaccacgcctaatttttgcatttttagtagagaccgggttttgccatgttggccaggctggtctcgaactcctggcctcaagtgatctgccaatctcagcctcccaaagtgctgagattacaggtgtcagccactgcgcctggctaagaccctgtctttctttttctttctcttttttttttgagatggagtctcactctgtggcccaggctggagcgcagtggcgcgatctcggctcactgcaagctccgcctcccaggttcacgccattctctcgcctcagcctcccgagcagctggaactacaggcgcccgccaccacaccc[137 bp omitted]cccggccaagaccctttcttaaaaaaaaaaaaaaaaaatacacacacacacacacagtagttgcttcatgatgggtgtatgtttggagaaattcgtcattagatgattttgtcatgcacaaacatcccagcgtacacacgcctagatggtagaacgtactgcacaccaggcttcatggtactgtctactgctcccaggctataaacctgcagagcatgtgactgtacagaatactgtgggcaactgtaacatgatgacaaatatttgtctctaaacatccacaaacagaaaaggtacaataaaaatatggtataaaatcttatgggagccgggtgcggtggctcacacttgtattcccagcactttgggaggccgaggcgggcagatcacttaaggtcaggagtttgagaccagcctggccaacttgatgaaaccccatctctactacaaatacaaaagaattaggcggatgtggtggcgggagcctgtaatcccagctactcgggaggctgaggcagagaattgcttgaacccaggaggtggaggttgcagtgagccgagatctccccactgcactccaacctgagtgacagagtgaa[136 bp omitted]ccggtctctactaaaaatacaaaaaaattagccgggcgtggcagtgggcgcctgtagtcccagctactcaggaggctgaggcaggagaatggcgtcaacctgggaggcggagcttgcagtgagccactgcactccagcctgggtgacaatgtgagagagcaagactctgtctcaaaaaaccaaactaaacaaaaaaaaagaaaagaaaaaaaaagaaacaaaaacaaaaacaaaaaacaacaaattaactgagtgtggtggtgggcacctgtaatcccagatactcgggaggctgaggctggagaatcgcttgaacccctaggcggcagagactcagtgtcaaaaaaaaaaaaaaaaaaaaagtctcatgggactcccttcacatatgtggtccgtcagtgaccgaaatgctgttatactgcacatgactgtttgctgaatgaactctgagtcttgcccccgggtctggagggcttctcttcccgtgccttcccgcactccactgcagccatcatctcatgtggggagagtgagaaggaccctgatccccctccgagagcctataccacccaggcagcaaagcagggccaggcagggtgcacagccacccccaagtggttctcaggccccacctctggacctcctaccctttgcagacctggagattcattcatttgtttatccattcattcattccacacatagttctggagccctgctgcgttcctcggctgggtgccggggtgtaggcagaggatataacagccaggatacgtcccagtcctcaaggaggtgcacataaataacacacgtgatggtgacgtgggacttagaaactggcaggggctacgggcaaaactagaaggcaaatgagtgtggagtgctggtggcctggggacgggggatgaggaggtggcttgtgagctgagaattgaaggaggtgaggggtgagcttggggacatctaggggacaggcattgcaggcagagggtatggactatgcaaaggccctagggcaggactgtgccaggggttttggaggaagagtgaggaggctggtggggctggagcagtgaagaggggaggggaggagagggaggggagggagaggaggggtcgggacacacagggcatagtgggctgtagagaggatttgggcttttcccccaagtggggtgggagccatggaggactgtgggcaggggaggggcgggacctgacttaggggctcacaggcgccttctggctcagggggtagccgggtgaccagggcagaggggactacgcttgtcgtgatgatggaatcagactagaggcagatctgggacagattctgaaggcaaaggggctcgagatgcggggagggcgggagcagctcttcagtcccaggaggggcacacatcagccccgtggggtcttctcagctgtgtcccaccccaatcatgtcaaacacatttataggagcccacagcccacactcaacacaagtttaaaggagtacagttgtgctcaagttggcagcgaaaacaccttcctttctcagtgaggtattttctttttttttttttttgagacggagtctcactctgtcgcccaagctggagtgcagtggcgtgatcttggctcactgcaagctccgcctcccgggttcacgccattctcgtgcctcagcctcccgagtagctgggactacagacgcccgccaccatgccagactgtttttgtattcttagtagagacagg[148 bp omitted]aagtcttaaaggaacaaattgccattttccaaacaatagctattcttaggagaagtaacacttcttttagctactgccaggccctgggaagtcacctcccgggcctcagtttcctcatctgtaaaataggactaatgcctaacagagctcacgcacggctgcgcagactaaaatgagccaaaaataataataacaactgcacctgcctggcaggtgggaaaagcttgatgttccccacccccaccccccttttttttgtcttgtgaatgttttcttggctcacccaagagcttagagacccccggcggcggggcctgggtcagcgccagcccaggccagcgttatttatttatttatttttgatacaaagtctcgctcactgtctcccaggctggagtacagtgacatgatctcggctcactgcaacctccacctcccaggttcaagggattctcatgcctcagcctcccaagtagctgggattacaggtgcctgccaccacacctggcttatttttgtatagtagagacagggtttcactgtgttggccagggtggtctgaaactcctgacctcaagtgatcccccagcctcggcctcccaaagtactgggattacaggcctgagccacggcgcagggccaggccggtgttcttggagccttgtctctgctggggatgtgtctccagggatggattctcgggaagcaagtgtgtgccctgcagcccccaggcacctctcctggaccaggaggcccctgatcgcccactgctctccctcacagcaggcctctgctgttgctgtgtgctctgcctggaccagcctcccgctgggtacacatggaaaagcctcttcatccttgggccctctctgctgtgccgcctcctcctctaggaagccctcctagctccccagggaggctctgcccctcctcagttccagccctgactgcctggggctgggaagggctccatgaagttcaaggtaaactcaggaagggtcccccacagcccctcagggagcctgctgggaccgatgttccagacgggggccctcttgtgtgtggggtgggagtgacgtcagccctccacaacctagtaaatgtttatgggccggggggcctcggctttggggttccctggagcccagcaagagaccaccccctcgtgttccattctggggggcccgtcctgcaggcgaggtgggggcgcctggcaggcctgcgccaaccctggcggctagcccggaatgggctgggtgggcggcgagcacagctcctggtctgagccgtcggctcccttgaacacagggaggcacctggggctgggaggtgcgaaggggcgtgcggcctttaaatttcaagctccactacccagggtgggcctcagcgcgcgcatccgtggaagagggctaagagatctggtacagggtttgggccgcacacgggcctggagggccggggaagggcttgcagggggcggaggcctgcgtggaaccagtcccagaagcggccatggtgcagggctgagggtgaccgtcgtggggacgtggactagtctttcctcctgtccagccttcggtgtccttggctggaggtttggggctgtattgcccattcctagaagccatcacttcccggctgcggtgggcaggatgcatgggaaggaagggggatgagggacagacaaggcctggagtgcggaggaagggatggaatctgacgcctgtggtcaccgcggggctgggggcctggggatgaccgcccgggtccacactgcccagcaggccgtgctgtggtgggcgctgccccctgccggccgcagtagagacagaggccggtgccctcgagtggatgcgatgcccgtgagtggatgggatgcctgcagggaggtggaatcgtctttctttgtggggcatctctgaggggcccttattcccatttaccaggtgggaaagctgaggcctgggtgctgccgtcctctgaggacagaacaaggaaagaatcaagttctggggttcgaacccagagtgtttaacaatgactctattagggcttggacaggtgtcagggcccctgcccctctgggtgcggggtgggtgtgtccgccctttctcagggagcccgaggcccgggcacccagctccggaagtggacgtgaccctgagctgttgcatgccccccttgtgctggaacacgcgtggacatctgtgctctctccagagaggacttcgaggcaggcgctggaagaagggacccagaatctctgtacacagtggctcatgcctataatcccagcactctgggaggctgaggtgtgaggactgctcgaggccaggagtttgagaccagcctgcacaacacagtgagatcctgtctctacaaaaaataaaaataaaaacaattagctggctgtagtggtgcacacctgcagtcccagctaccagggaggctgagatgagagagtcgcataagccaggaaggtcaaggttccagtgagccatgatcctgccactgccctccagcttgagagacagagcaagactatgtctcaaaaagacgaatttttggtagagacagggtctcactgcgttgcccaggctggttccaagctcctggcctcaagcaatcctcccacctcaacctccaaaagtgctgagattacaggctcaaaccaccaggcccagcctacaacattttttaaaaaaattaaccaggcatagtggcggtggccatagtcctggctactcgggaggctgaggtgggaggattgcttgggcccgggagttccaggctgagttactactcgggggtggacagagaaggatatgaggctgaaagtgaagtttggcttttcacatctaggccccgcggatgggcttgagaaaagggaagagatggggccggatacgggtcaggagggccatagccagccctgccggttcctgctgtccccggcccaccagcagggcccagatccatcccagccagggctgtgcacagctccgctcccctgggtggagcctggagcgccctaatttgcagcccaccgcagcatgtgggagcttgcaggcttcctctccagctgccagggagcatgagccagttctggagaaggggcccggggtggtgccagcattccagggccacctaaatcactggcctgacaggtggcaggaagggatcgcaattctttcccttgtcgctgccaccagccaggtgctgaggggggtcctgtcccgctctgccctagccccaggggctgcgagtgacctgccggatggggacggctgctggaccagcctgtccggggctctccgctccagtgcccaggaatttggagacagggcctgggcgtgttttccacatgttgttggctttggggacaggcccagagaaaggatggctcaagatctgcaggggggttgtgaccagagcccacagcgctgagggaagggctgtgggcggcagggcccattttccacttgctggcaggtcactggcacgctcctgccctgccctgggaactgggggaagcagaggctggggcgcatcccagccgtctcccctcctgggctcccgatggccccagcctgatgcactaccagttctgtggggccaggctggtacccttggcagggacggcaggcggcaggcaggcgcgtgtgcagggggccttatcttatctcccttcctcactccctcccagatccgccctcaccggctgctgtgtcgccgtcatcaagccctccggacactgacacacacacagacacagaatttatttctggacgcattctgcaggctggaggtcccggcaggcacagggctcacaccttgggttttgcaaacacctcccagccctccagccggcccatcttgaccagggaggccgctatgccaaagtacacgcaggcggcggcgccaatcccgtagttgtgcgctgtgggagtggggaggtgatgtcaggcccgggtggggctcggccggaccaagacgctccacgccctggccggtgcccaccctgggagccagactgagacccctgacaggacactctcttcagggattaagtcactcaggaagagggccctagactctggagatgtggaaactgatgcacagagggaggccggagtccaggttgcttcccagcaggaacccaggctgtgggtcctcatcccgccccacactgacttccccctgcgaggacaccgtgctgcccccagctggggctggggcaaggctgggcaccgggccatggtgacacatcggtgtgtctcagtctctcctttgcccatggatgccagggccaggccacgcatctgtcccgtggtctgtgtaccgaggagccccgacagtgcccccacttctccaggctctcctgctccgaagcctccgggccagaggaggaaggaggtgtgtccccacacaccaggacctaaagggactcacactctttgaagagagacagggaggctggcttggggacagggagcagttccagcctgagctgggctacagtcaagacctcaacccacctgcaacctctgaccagttccagtgggagctggggagggacaaggcctccccaaggtcttgacgcagagacagcagtgacggcgtacgccctgccctcgcaccctccctctctgcctgcctggaacctgccattcatcactcccaacatgccaggccagagcggctgagctgcaagagggctcgttcactcctcccgctggccctgagggcccgagccttggcgggctgggggtaggccaggggcacaggcgggcactgacgctgagcccgggcccatgggagggcaggagtgatgtctggctcatgctccagacgggctcccctgtgccaagcgtggccttctccaccagggctgcaccctctgatggctgcaaagaaggccacttgctcctccaggtgacctcgggccacttaattccctccctgagccctaatacccttttctgtaaagtgaaggttgcgggggcagctcccctgcagggctccaggtgcagggagagagatggcagggcgagactccatccatcctcctctctgactcacaggccagtggcagagacagggggtgaccttggtgacctgtgtcctctgacaaggcacacagaaggaaggcggcacagagcgagggcggcggggatgctggcttgtacacagggtggtcaggacagtgaggggaacagcattccacgcagtgcactgcccatgcaaaggccctggggcaggactgtacctggcatgtgggaggagcagtgaggaggcccgtgtggctggagcagagtgaggaggggagggtggggaggggacagggcaggtcagggagggccacagtaggtgcttaagcagcagcagcagctgtcgctatgactgaaatggctggtgttcaagaaggctgctttacttcttgtccgggatggaacagagagggtggaggatgagcagaggtcaggggtcattctgccaggctgggaggagggtgggggtggggagggggccactcactgcgtgctcccagagtcaggcctccggcgcagccaccgaggaagtagttcagggggtcgtcgggcttctcgcggacatgggcgctgatgcaggtggtgaggccaaacacggccccgacagcagctgcggggtagacgggaagagcaagggcctcgagacgggcacagcaggagcctcttgggcgctcactgccagtgtctggatggagagagatgccacgagtcggctgctcgctgtgcatggcagcctcctggccccagtcctggagctgttctcctgggcctccccaccctacatgtattcctgataaaggaacaccccactttctccggatggccagcactgtggacacgggctggggagtcagagagaagaggcagccgtcaaatgtgctctgagagctggggctgtgccaggagagggcccagccatgcccagcccagcgtgctcacctgcagtgaacgtgtattgtccaaccttagccactccttcaaggaaggtgcccggaggattgagtgtgactctgtaggcagcggcggtcaggcctgcgagacagaggagggaggctgttcagaccccactgctgctaagcccttgcttggccgggcaccccactgggtggtctccctccctcagtcctcacgatgccccccttctttgcccatagtgtccccggctgctgagtggcagagctggatttgaactcgggtttgctgctccaaaactggggggcctctcacttccttccccactccccgccaggccttccttggccactttctcaagcctgaccagtactggctcctgcagagcacctgctgggcgcccatcagccatgctggccctggcagggcaccggccggcagacggagactcatccacgtggtggacacaagaacaggcctgagacctcagttctgcggctgcttccagcctcacaccgccagctcagcggcgccccccacgggccctggcaccagggccccagctccaggttcccatcaatggctctattctcctgtggggcccggggctcctgggcctaatcccccttggcagtggctctgcttccctgcctggctgccaacgcctcctccttgccactctcgaccccctcctgctggcagctcgggcctgggctcgtcctgcacacctggctgtctggctgccgcccccgccacccagcctcgccactccggtcagcttttccatctctgccatttcccaggccgcctggcccctgacattggcttctatgcatgaggagcttgggccggggccgggcccagaactcagggccaggtaggtggtggggacggaggtttgatcccagcccaccgtccctgctgggtgcctaggggcgtcctgagtgaggctgggcagtcccttgggccacgtcctcccagagcccgcccagcttcaccagcccctctatggtggatgggcagattgagccagcccgagccggggctccccaatcctctgcctgactgctcagggcaaacaagcacccccctctccctacagcctcgaaacatagcccagttgcaggcagggacctcctcgggccagcccatcccagagaaaacagaactgccagggatgggccacaagggccctcatccttctcggggcccgatgggctcagtcccgttatcccctccttcacgggaggtgaagggacctccgagatgtaaagcaattctccagaggtcacccagcacagcgagcctggacgccaggcaggtctgaccacagcctatgcttcacccaccacgactgccccaggggagtgggctccaccccagttccccatccagcttcaagggacccatgggacatgccaggcctggcagtgaccccccccaacagcaccctagcctcagatccaattcagctcatgttggttctgtccctcaagagcgactgaggggactctcacatccagcagtggggtgagcacatattcagagcagcccataggagggaccatctgctccccacaagcacagatggggaaactgagacccaggatgcagagaaagggaccacatataaagagtaccttgtggatctggtttctcctaatcctacaccaacccctgggattcctgctcgacctcagaaaggtggatggaggaccaggcgcagtggctcacgcctgtaatcccagcactttaagaggccaaggtgggcggatcatttgaggttaggagtttgagaccagcctgaccgacatggtgaaatcccttctctactaaaaatacaaaaattagccaggcatggtggtacacatctgtagtcccagctacttgggaggctgagtcaggagaaccacttgaacccaggaagcggaggctgcagtgagccaagattgcgccactgcactccagcctgggggacagagtgagactccgtctcaaaataaaaaaaaaaaaaaaaaagaaagaaaggtggatggagcggagtgccaggtctgggggctgtggcaggaaagggggttgctactgcatccacggtaagggactggagtccagtacagccgtccccccaggactccccacctgctcctggcccagcagccccatcctcagtcacacttcagtcagtgcacacacacacacacacacatcccccccttccaaattcttttatgtatttactaattga[140 bp omitted]cctc[134 bp omitted]ggcctcccaaaagtgctgagattacaggcgtgagccaccgcgcccggactctttttttttttttttttttttttgagacagtcttgctctgttgcccaggctagagtgcagtggtgcaaacttggctcactgcaacctctgcctccttggttcaattttcccacctcagcctcctgagtagctgggattacaggcgcctgccaccatgcccagctaattattattattattattttttgtatttttagtagagacggggttttaccatgttggccaggctggtctcaaactcctgaccttaggtgatccacccacctcagcctcccaaagtgctgggattaaaggcctgagcaaccatgcccggacttgaagattcttaatgggaggggactgccagccctgcctgggacctgaaaagtcctgatccagggctgggccagccatgacagtcttataaccctctcatctcaagagggaaccaccgacaagactcagtgacgcccccagaactgtcaccgagggactcctgggcggaacctccttacaccacccccacatgccagctgtcctgaccaagggacccctagctcatggagcacacctgacacggtgagtgcgcccaccatcctccatcccttccaaagtccttgaactgggagtggacgagctgggaccccctgattatcccatagaggtcaaggactgccccaccccaactctgccccagctgtcatccagctgtggtgtcctgccatatccacccctccaggagcccccagcgcccttcaaaaggcccccttccctctgaagggaaactgctggtttcctctgagcctcccacagtgaccgccagacccagtgtgaattcattcattcattcagctactgccactcattcattcattcacaaagttaccgagtacctaacaaggtgccacattcactcattcattcactcacaaatggtgcccacaagatgcttcattcattcattcattcattcatccatagttatcatgtgcccacaggtcctgggctctgctgagtatagtctccccgccgtccagggtccccaactcagggaagccagccaggaaacaatttatctccctcagatgagaagtgaggggagccccggaatgaagtgagtggggcagtgaggggaggacccagaaacacgtttcagcaagttctgc[137 bp omitted]atggcgaaaccttgtctctactaaaaatacaaaaattagccaggcacggtggcaggcacctgtaatcccagctacttgggaggctgagacacaagaattgctgggaggcagaggttgcagtaagccaagatcgcaccactgcactccagcctgggtgacagaatgagactccgtctcaaaaaaaaaaaaaaaaagaaaaaagaaaaaagaaaaatttagggagaatgaatgtcactctcaaagaccccggggcacccttggagggctcacagaagccactgagcacccctaaatctaaatctgatgccatcagcgatctcctgacatggcaactctgtcaaaagttctgacctccccttctaagaccctctggggagcacccccggtctcagaggcccttcactcagcagcaccacaccccgagacaagctgtctcctccaaaggcctcctgagaccgcagcccactcattttgtattcacacatgaggaatgcacacactctctcacatgaacaccaacatacgcgtctttctcagtttcagatcctatcccctgggtggcccccttcagccctttctcttgaagaccctcgataaggacctgatgggaacattccttgcttcagagacccctaggagcaggtcagccgacctggacttgcagcccagcttcaaatgaccctggagcagttaatatgcttctccaaccttcagtccctacctgtaagaaatggagacacaataacgtctgtcttactattaataaatatgcaaaatatgggagtgatgattaggtctgccctaattcaaatgcctcccaatggagccgcaactttggccgggccctgtttcacatatgctggaaatacagagttgaccaaattgattcctcagcttatagacacaccaggttgtaaagactgtttctttgggtttttttttttttttctttttgagacggagtcttgctctgtcgcccaggctggagtgcagaggcgcaatctcggctcactgcaagctccgcctcccaggttcacgccattctccttcctcagcctcctgagtatctgggactacaggtgtccaccacca[141 bp omitted]ggctggttttgttttgttttgttttttgagacagcgtctcactctgtcgcccaggctggagtgcagtggcacaatctcggctcactgcaacctctgcctcctggattcacgccattctcctgcctc[134 bp omitted]agtgctgggattacaggtgtgagccaccatgcccggcctattatttttattttttgagacaaggtctcgctctgtcgcccaggctggggtgcagtggtgcaaacatagctcactagagccttgaactcctggtttcaagtgatcctcttgtctcagcctcctgagtagctgggactacaggtacgcaccatcatgcccagctaattgttttacttttttgcagagatggggatcttgctattttgcccaggctggtctggaactcctggcctcaagcgatcctcccactttggcctcctgagcgccggattacaggtgtgagccaccgcgcctggcccagtttgtaaagattcttcatcagagggaagaggacttccagctccatctgggacctgatgagtcccaacctgtggctgagaattaaagggcatgatgcccatgaaacgctcaggctggaagg[222 bp omitted]gctgaggcaagggaattgctcgaaccagggacgtgaaggttgcagtgagccgagatctcgccactgcagtccagcccgggcgacagagcaaggctctgtctcaaaaaaaaaaaaaaaaaaggagaatgccagggcttgcgggtccccttcattcccctgcaaggctaccctcatagtagctcctgatccacctcacctaggacctctctggcggtcccagtaaaagcttcaggtgtccctaaccacccagcaccccctgaccacagaaagacctcatcccaccccaaaactttctcaaacatctgtaccgccctcagatgccccaatcatgactcatgatcccctctaacaatctctaccccgttggaaagtctcgtggtcccttagctccttggacctgataatagccctgtctcactccacaatttccccgagcctggcgatagcttgggaccgcctcagatgaccccagggactagcttgtcgcatgtcacgacctcccagtgctccccaaccctgctggaccccctaccaacatccatttcacacaagatccccccctacgaccgcccaagacaccccgatgacaaccacgtgcgtacccgcgagactcccagacccgttcgatccaaacagcccccagtaaccccacgacctccctgcggcctcggccctccaccctcggggcccggccggcgctcaccagcgacgctggcaatactggtggtgctgtaggctttgcggtggcaatcggtgccatcggggatatcccagtactgacgaaaaaccttcggcgccatagcccgcaatctcgatcccgcaccacggaccccgccagctcgggaagcgcaagggcagccgcggctggctatcgcgagacttctcgggctgcgcgcgcaacctttcgggctagcgggccggcaacaagtgagcaactttattgataggcgcggacatggacatggatcgcgcgcacgcgccggggaccggcctggaggaagagagtagcacgtgcatccccaggccgattcctagagggtgaaactgaggacgactgcgatcagtgcagacagatttcgctagtcccagctcagggagtcctaggttagggactactagaggcggggactatctactaggggaggggccgggctcagactgggacgggcgggactccagttgataggagcaagacatgacgaaacaatgactggggggcggggcatggcggggatgtggccacacccagtgtcagaatctgcatagcgagtggtcatgccctgtggtcagtcaccaagctggagtctgagcagcgtgctactgttttgggccgtggacaggatcaggggcggggattatcgggaaagtgaccaatgacaatacgagaagctcagcgggacgtggcctctgttcaccccgcggctgtcccacgccctaggccggatgaagtacacaggcgcttgacttgggggcgtggctagaattggaggcataacctaaaagggacttgaccaatctgagactgtataagggatgaaggggcgaggccgtgcctggatctacccctgacaggccacaggttcggggggcgtggtcaggcttgctgtttcgcggagtccgggccaatcctggtgttagcttccaagtagggaggggacagtatcgaaggtgtgaccaatcttgtttccagagcctgagttgcgcgagccgccaaaggatgtggccagcctgggggcgtggctgtcaagatcttgtccaatcctagagtgagcccaaactcaggggcggagtttcatgatcccggaaccggtggtagtgtttgggtttgaggagagcacgacccagccctctggggtggggtctagcggggtcagcgaccaatcgcgccgaggtctagtggggcggggccctcccgggggcggggcctgtgccagttccgggccgcctgggggcgtggccgggcctgtacagcagcctgggccatgtcggcgccgccggccctgcagatccgggaggcaaacgcacacctggcagccgtgcaccggcgcgcagcggagctggaggcgcggctggacgcggcggagcgcacggtgcacgcccaagccgagcgcctggccctccacgaccagcagctgcgcgccgccctagacgaactgggtcgcgccaaggaccggtgaggcccggggccggccaggtggacttcaccgaggcggtaggcggaggcagagccgaggctggaaagcgaggaagggcagggggaaccgtgtgcacttgtatagacgctagactgagtatcggattgataaaaacaccaaaaaactcgaattagtaatcagtatgtaaagttgcgagaagtgacacaggtgtggacctctaacttcaaacaggcccactttcccacaggtgctgagcgacgcagggaccacagaccgcccagcgtaggcattgggagccatagcaggctcttcagcaggggaggaggggatcatatcagcattttaacttttaaaatttattattatttttttgagacggagtttcgctcttgtcgcctaggctggagtgcagtggcgtgatctcagctcactgcaacctccacctcccagattcaagcgattctcctgcctcagcctcccgtgtagctgggattacaggcgcccgccaccacgcccggtcgattttttgtatttctagtagagactggttttcgtcacgttgtgcaggctggtctctaactcctgacctcaggtgatccgcccgcctcagcctcctaaaagtgctgggattacaggggtgagccaccgcacccggcctaaatttattatttttgaggcagggcctcactcctatgcccaggctggagtgcacctcgacctccggagctcaggtgattctcccacctcagtctcccaagcagctgggactacaggcgtccaccaccacgcatggcttattttttgtatttttttgtagagacagttttgccctgttgcccagtttggtcttgaactcctgggctcaagcagtcctcccacctcacccttccaaagtgctgggattacaggctaagccaccatgcctatctattatttttgagagagggtcttgctctgttgcccaggctggaatgcagtggtgcgatctcgactcactgcagtctcaccctccctcctcagcctctcaagtagctgggattacaggcgtgcgacagcacacctggctgatttaaaaaaaaaaatcctttagaaatggggtcagactatgttgcctaggctggccttgaactcctgggctcaagtgatcctcctgcctcagcctcccgaagtgctgggattataggcacgagccaccatgctggcccatatcagcattgttgaagagtccctctgacagctgaggatgaaagagatgagacaggcacccagggaggtgggaggagctgggtcccaggtgggaactattacttcagagctaattggacatattcatttttaccgagcacctgctctgtgccaggcactcattcattcgtcttcattgagcacctactgtgtgtcaggcattctgctgagtactggagcacatcagtaagacttagccttgcccattgggtatccacagtccagtggagagacagacatgtcactgggcagttacatcattggtggccagcggccatgatggaggggcatatggggctctgagggatctcagagtgaaggcttcccagaggaagagcctactaagaataggtgggaaaagataatggaaaggaacgaactgcaggaagagtg[132 bp omitted]gccaacatggcgaaaccctgtctctactaaaaatacaaaaaaattagctgggtgtggtggcacacgcctgtagtcccagctactcgggaggttgaggcacgagaatcgcttgaacccaggaggcggaagttgcagtgagccgaaattgtgccactgcactccagcctgggcaacagagagagactctgtctcaaacaaacaaaaaaacaaaatgccataaattaagtggcttaaacaagaggtttgtttctcagcgttctggaggctggacgtccgagagcagggtgccagcatggtcaggttatgggagggccctcttccgggcttgcagatttctggcttctctctgtgtcctcacagggcagagagagccagggagttcttttgtatctcttcatataagcacactaatcccatcatagagacccccaccctgacaacctcatctaaccctaatcacctccaaaaagctccatctctaaatacccttctgctatggttagactttgtgtttccacccaaatgtcagcttgaattgtaatcccataatgcccacgtggtgtggaaggaactggtgggaggtaaatgaatcatgggggatggtttccccttcatgctattctcatgatagtgagtgagttctcatgagatctgatggctgggcgcaatggctcacgcctatactctcagcactttgggaggccgaagcggtcagatcacctgaggtcaagaatttgagaccagcctggccaacatggtgaaaccctgtctctactaaaaaaaaaaaaaaaaaaaaaaaaaattagctgggcatggtggcacacgcctgcagtcccagctactggggaggctgaggaggcagaattgcttgaactcgggaggcggaggttgcagtgagccgagatcacaccactgcactccagcctggatgacagagctagattccgtctcaatcaataagggagatctgatggttttataagggattccccctttgctggtctctcactgtctctcctgctgccctataaagaggttccttccatcatgattgtaagtttcccgaggccacccccagccatgtggaaatgtgagtcaattacacctctttataaatcacccagtatcaggtatgtccttagagcatcgtgagaatggactaatacacctcccattggggttaggacttcatcatatgaattttggggagacagaaagatgcagttcaggctgggtacagtggctcagcctgtaatcccagtactttgggaggccaaggcgggtggatcacttgaggtcaggagtttaagaccagtctggccaacatggcaaaaccttgtctctactaaaaatacaaaaatcagtcaggcatggtggcgcatgcctgtaaacccagctactcgggaggttgaggaggacagtttgaacctgggaggcagaggttgcactgaactccagcc[131 bp omitted]ccagcatggtgaaaccccatctctactgaagatacaaaaaactagccgggcatagtggtgggcacctgtaatcccagctactagggaggctgaggcaggagaattgcttgaaccctggagccggaagttgcagtgagctgagattgcaccattgcactccagcctgggcgacagagctagacttcgtctcaaaaaaaaataataataaaataaaatataataataataataaaaacaaagaaacattctgttcataaccagggaggaccctgaggcagtggtgaggaatgcgggctttatcccaaaggtgatggggaacctcttgcgggtccagagcagggaggagcaggtgctgtggtcctcagttctgtaatcacctcctcttgccttcctgccagtgagattgccacactccaggagcagctgatgacctcagaagccactgtccacagcctgcaggccaccgtgcaccagagggacgagctcattaggcagttgcagccccgggctgagctgctgcaggacatctgccgccgccggccacccctggctgggctgctggatgccctggctgaggctgagcgcctggggcccctgccggccagtgaccccggccacccaccccccggtgggcctggtccaccccttgacaacagcactggggaagaggcggacagggaccacctccagcctgcagtgtttgggaccacagtgtgagcccggaatgcagattacagaatggagacagaaagccactgctgtcagtgtccttgggagtcaccagcaccctgcagggggaccctacggcagagccaaagtcctgtctaagcatcagaacaggctgaacagtcaaaaagttttcaaataggcccacaggccaggtgcagacgtttaacccagacagaagtgttcttgtttgtttttaagctttgaatcagtcacccttgctaaaaacctggcaatgcaaacacaaagatctggatttctggcaagacttggccaagcttgcctggagttcagggcaccctctttagccagggtgtgagtttctgttttttgtttttttttttttaagacagagtcccactctgtcgccctggctggggtgcagtggtgcgattttggctaactgcaacctccgcctcccaggttcaagcgattctcctgtctcatccttcagagtagctgggattacaggcgcccaccaccacacccggatattttatatttttggtagagaccggggaggggagggggtttcaccatgttgaccaggctggtctcaaactcctgaccttaggtgatccacccgcctcggccttcgaaagtgctgcagttataggtgtaagccaccgcgcccggccctagcctagcttttgtagcatgcaactgtctcctttttatacgccctaaagaatatatttttgaactccttgtttctgcgctgtccttcttagcccaggacattcagggtgctttgcttgttgtcaaaccagggaaaggagaaaactcctgtgcctttctgggccagcctgtcaccctggcctggtcggcagccattcccctacctcctcactcaggaactgtcacaccaggaaccggcgaggggcacagcctgtttcagaccagaaaggtcggaggccacccacggccttcaggatggcgcccgcctgcctgcctggcaacagtgacccctcagtgcagtaacaatgggcccattttctcctctggatgaacaaggaggggggttgtttgtacaaaggaaaggcaggctggggcctgtctgtgctcaagaataaaccggatgatttcctggcctgggggcaagagggaggccctctgtgttatttgtgcctcctggtagggtcctgctgggccaggtagaatctagggagtgtaggccaagcactctctacagcgattgcatctaatcttcgagtttccctgtagacacaggctttgtcctcattttacagctgtggaaagtgaggcccaggccgggcgcggtgtctcacgcctgtaatcccagcactttgggatgcgggtggatcacctgaggtcaggagttcgagaccaccctggccaacatggtgaaaccccgtctctactaaaaatactaaaattagccgggcttggtggcgggtgcctgtaatcccagctactgaacccgggaggcggaggttgcagtgagtggagattgcaccactgcactccagcctgggagacagagtgagactcagtctcaaagaaaacaacaacaacaacaacaacaacaacaacaacaacaaacagaggcccagaggtgtgaagggaacacactccgggtctggagggccagggccacttccaattctgggggaagttattgctgaaattctgttttctttctttctttcttttttttttaaagagacaaagtctcactgttgcccaggctggagtgcaatggtgtgatcacaactcactgcagcctcaaaatcctggtcttggctgggccagtggctcacacctataatctcagcactttgggaggccaaggcaggtggatcacctgaggccaggagttcaagaccagcctgaccaacatggtgaaactccgtctctactaaaaacacaaaaattaaccgggtgtggtggcgcgtgcctgtaatcccagatactcgggaggttgaggcaggagaatcacttgaacccgggagatggaggctgtagtgagccgagattgtaccactgcactccagcttgggcgacagagggagactccgtctcaaaaaaaaatcctgggatcaagctatcatgctacctcagcctgccaagtagctgggaccatgggcatatgccaccatgcctggctgcgtttttgcattttttctagagataaggtctcattacattgcccaggctggtcttgaactcctggcctcaagtgatcctcccgcattggcctcccaagaaattcttactaaacatttacaaatgagatgccaaaacagcacttcagtaatagtggttatattttatagttctctacacagaaaaaaaaatgctgcttgtaacactcatagacatgaaagtatttctctgcctatttaaataattctggattgcagtgagccaccaggattttggcagccagatgtcaccatgatttctcataaaactgatgatgttacatcagtggtggcctgaatcaagatgctgggatgcctgtaacctacagattggtttcagactccaaaggcaacttttttttttttttttttttgagacggagtctggctctgccaccctgccacccaggctgaagtacagtggtgtgatctaggctcactgcaacctctgcctccagggttcaagtgattctcctgccttggcctcctgagtagctgggattacaggcatgcaccaccatgcccagctatttattttttttagtagagatggggtttcaaaatgttggccaggctggtcttgaactcctgacctcaagtgatccgcccacctcagcctcccaaagtgctgggattacagctgtgagccaccgcgcccagccctggcctctttttttaagttatttatttatttttgagacagagtctcactctgtcgcccaggctgtggtgcagtggcatggtcttggttcactgcaacctctgcctcctgggttcaagtgattctcctgcctcagcctctggagtaggtgggattacaggcacccgccaccatacctggctaattttctttttttttttttgagacaaagtcttgctcttgtcccccagtctggagtgcaatggcacgatctcggctcactgcaacctccgcttcccaggttcatgcaattctcctgcctcagcctcccgagtagctgggattacaggcacataccaccacgcccagctagtttttcgtattttaagtagagacagggtttcaccatgttggccaggctggtctcaaactcctgacctcaggtgatctgtctgcctcggcctcccaaagtgctgtgattacaggcatgagccaccgcacccggctgactaatttttgtatttatagtagagacagg[147 bp omitted]taacccaggctggagtgcagtggtgcgatcatagctcactgcagcctccaactcccgggctcaagtgatcctcctgcctcagccttccaagtaggtgggattacaggaacacaccaccatgcctggctaattttttgtagtttttgtagagatgggggggtctcactatgttgcacaggcgggtctcaaactcctgggctcaagtgatcttcctgccctggcttcccaaagtgttgggattacaggcatgagccaccgcgctcaggcaaggcaacttctgacaatataattgtgctgtgagcgaggtaaagccaggcttggagaaggctccgattgatgatccttgggtcggggcgaacagtgggtcctcaaacagggcccacgtttcaagtcctggaaaacccacctatcttagcgggcaggtatatccgatgtctccgttgaaggccttcagtgaggtggcttcgtctcttgaggtttatgtccaggatcagggctgctcttccactcggggtcacaacctctggctcaccaccttgtcaggagccagcccactaagtcacgtttcaggcctgaaaaccaacaacaaaagatccgtaaagacagaaatcctgggactggctcctaacaacggccagtgacaagctttgtggcagtgagcagaggtgtccctcaggctcagctcagtctctgtgggttgcaggacctgcccttggaggtgggcctgggtgggaggtcttagggccccaggacctgggccacctggggctttttttttttttttctttttgagatggagtcttgctctgtcgcccagactggagtgcagtggtgcaatcttggctcactgcaagctccacctcctgggttcaagcgattctcctgcctcagcttcctaagtagctcggattacaggcgcccaccatcatgcacggctaatttttgtatttttagtagaggcggggttt[132 bp omitted]gaaacaagttctctatatgttccccaggctggtccaaactcctgggctcaagtgatcctcccacctagacctcccaaagtgctgggatttcaggcatgagccgcagtggccggtcagaacctggggcccttttgaactttgattcctcagcaattttgtcagccctggctcgggctgagaagcccctgtgaagccagagagggaaagggacctgtccagggtcacacaggaatcatgcgtcaagcctccccagccacggacttgtctccatccagggcatttcagcccctgcagggcagtggcctgcccctcctccttggagccaggaagggatgcagtgccacagggatctggctctgtcccaggccctgtggggctggcagttgagtaagcagtcaggctgggcgcacccatccctcccccactccccactgcccagcacagtgcattcatgcagctgggccccaccccatctccagaggcaccttccactagcaacagtctccccaggcacaacacagctaacacaaggccccgcaggcaggactctgggacagacgcaggccaggtgagcatctgaacaaggggcagtcggccagggtgggcttgcgggagtccccaccttgacctctctcccttccagctgcccagagcccagaccaagcatggacgccgtggatgccaccatggagaaactccgggcacagtgcctgtcccgcggggcctcgggcatccagggcctggccaggtgagctgtcccctctcaccttcctgaccccggcccctgagaccactgttccaaccgtgtcccctgcctccaggtttttccgccaactagaccgggacgggagcagatccctggacgctgatgagttccggcagggtctggccaaactcgggctggtgctggaccaggcggaggcagagggtgtgtgcaggaagtgggaccgcaatggcagcgggacgctggatctggaggagttccttcgggcgctgcgggtgagcccccacctcacagtcaaggcgtgtgccctgggcatggggcgacagaggatgctgagatgcggagacggggactcctccctaagagctgctgttaagaggcgcctgctggggcatacagccccagtgctctgcacagcgtcttgggggtttgggtgtgctacccaccacccccagtcaccacctcctgtcccagccccccatgtcccaggcccgggaggctgtcatcgcagctgcatttgccaagctggaccgcagtggggacggcgtcgtgacggtggacgacctccgcggggtgtacagtggccgtgcccaccccaaggtgcgcagtggggagtggaccgaggacgaggtgctgcgccgcttcctggacaacttcgactcctctgagaaggacgggcaggtgggtggctgcgcggggggccccctccccaggcagttcctcggccgtgccccctcacggccctctgttcccaggtcacactggcggaattccaggactactacagcggcgtgagtgcctccatgaacacggatgaggagttcgtggccatgatgaccagtgcctggcagctgtgagcagctccggctcagccctgctgccctggcctgtcactccccacccctgccggagacctcccttccctgggccccttctctcctgggcagccacaccacagagcggggaggggcaggtgggggaatggaggctgcaggactggctagaccaggtccctgccggtccaccaggcggaggtgggacaaaggtcctaacaggagtcactggctcaggaccccagggagaaacgctctccccacccacgccatgctgaccagagatcttgcagcccctgtggatgcccccgccgaggtcccccgatccccgcacccggactgctgctccctgcccctcccttgcgggtcccccaggaagccaggtgaccccaggtgggaggctgtgtgtggaggccatcctggaaggaagtttagacctgcccaggtgtggagcgaggggcacaggggcatcctaacctcagaaactgaaataaagcctttgaaaaaaaaatctgtaaaacatcaacccccaatcagaagatggcaaatggggaataaaaatagcaggtaacatgtccagcgggcccagtatctacattctggtgagcggcccgaggctgggagctctgggcgggggcagaccggcggggccttgcagcaggggtgggggtaaagtgcgggtggtggtggagagaacagggctgtggctggaccccagcactggtgacacgctgggtgggagcatgaggccccaggctgctggaggtcctcgcccggggaggtggaggccgttcctggtcaggggcttcctgaggcccctggggcatgcagaggccagggttttagttaaaagtttaatgtagttcccaaatacatttcatatgacaatcttacataaatgttccaaaacacatgggcgttatctcgttgtactcgtcactagctggctaaggcttaaagcagagacgtgtgactgggtctctcgggagggcctctggttcttcccgggctcaggcttgctgggggctgggggccagggctctggcgacctagaggtgtggacggcacagctgcaggaggccttctcttaaccctccgagagtgggactgggagatttcctctgaagtcccaaagaggccctgtgcccaggggacctcctcctcggcctcccaggtgggtggtgcaagctggctcttggccatgctccaggctcgggtgggcacaggcgtccactccagtgtgctgcgtgcttgtgagactgcctgttctgggaccagcccctgggctcttccaccaagatttggtgagggtccccctctgcctctcacagaagcccctggccctggactgtcctgggggcagggacacctgtggctggggaagggatggccaacagcgggaagcagtttgcgcctggtgcctgatgatggtgaaccacgtgacagatggagacgggagtcaggggaccctggggacccttccaggtccagtgaccttttcccagacaggcactctccaggcctaggacagacagggccccaactcctcatcaccccatgacttggcctggaggaacctggggtgggaaacaagtagtcccccaacctcagaggccagaaccacaggtgggggacagggacctcgacagagctgtgcctgctcaacgctcgagagcatcttaacctaagaaaccaaaacaaagccttcgaaaataaaaagaaaaaaagatgtaaaatatacacccccaatcagagaggggaagtgggaaatgaagatagtagttaacagcacgtccaatgggcccagtgtctacactcgtacgagcagccccccaagctgggcgggggtcccaggcctatagttggggagccctgggcaggggcagagggctggctgctccccacaaaggcagggccccacagcagggtgggaagggtgtgggtggcggagaagccaggggctctggctggacccagaggctggcgacacgcggggtgaaggaacgaggtctccagtcccagtgagaagccgtgacaagtcttaatgtgccatttcaattcaaaggaggggagggaggaaatgttcttgtttgttcgctcatcaatatgatgaggtctcgtgtcccaaaccacattcaggcagttcccgagtctgcttttgaacaggacgtgcgggtccagactgtggccggcccagtggggtgtgtggttcccggccccgcacctggacgctgccggtggggtgggggcgggtgggcgggtggatagacggacaaagcagcagcctggtgtgcagccgggctcccggccgctatgtgctcccggtcgtctgcccgtccccttcgtcaccagcacctgcagggaagcagcagccccgcatcaggatggagcccgcacttcccaggtctggccacccccgccaggagatcagcactggatcaaggatggcgggcagctctttctatcccccccagggtagggaccacccgactcaccagctgcggtggcccctgaaggagccaggacatcgtcatcgtcgctgtcgtcctcctcgttggatggggctgccccaggctcaggcgcgggcatcttggcctcctgctcctgctccacgcggctgcgcagggccaggatgcggtggtgcagggctgcatacaactgacctgtgtccttggagctggcctgggaagggaggagggtatgagacccccggaccccagtcctaccccctcctgccttctgcagaacacaagtgccaagtcccaaggttcagaggtgacactgccacaaggccttgtggggaggccattggccctgggcctgccggcctctccccgaaaggatgccaccactcccaggtggctgggaatatcccagaggtcagggttggtggactcgactgtgacaccatgacataggagagaggtgaccgccccacagggctgttagccctgaacacatcacaacccctcagccaaaccccagcggcttctctgggttgagaagaggacaaggaccatgatctctattcctgaaggctgggactggcgggtcccatagtgcttcttgtgtcccaggaagcaactgaagcccctcccccctcccctccccaccgtcctgcctgatctgtgtgcccaggaacccccacagggctggcaggatgaggggtcccagatgcacccgcgtggctggctcaccgagatcaggaagaccttcacgccctggtcctcggtgtccatggctgtgatgcgaatgctcttctcgctggccttgtcgatctgcatctgggcccacagcttggtgttgaggatcagtcgcaggctcccctgggtccgcatcactacaaccaacaaggccactcagccctggcccccacaccggccccctcacaaacagccagctccaagagccaacacagtccagatggaaagcgacatcaccgcgcaaaagcccatgatcctcccaggacccacccacagagcaagacttctccctgaggccagccctggcacacctgctcccggggcggggctcctcctccccaagcctggaccactgaaggccacaactgcaggtggctgcacaggctggtgctgcagatcagtgaccagaggccacatgcagcttgtgggaggttgtgtttggtccacacaggtgggcaccaggatggcagttcccttggagaaggggggattagagaggagtacggggtgggctgcgggaggcaggggctgacactcaaggtgcatgcgctttctgtgtgtgtgagacatcggcctccatgggagtccacgtcctcctgactggcctcccctgagtgggccagccctgccctctggtttccttaggagaaggcagagtaggaccgcagcttagcgcttccatggagaggagacgagaggactgtgggcagcagattacggaggaaaatgggagggccctgactcttctagaggatgcaacacccctgcgcctggcctgggcccaccccgtggactcagccaagcccctaccttcctgccagccgcctctccccactggagcaggcctggagacggtcagaaacttgtccccctgccctggcccagcgaacagacctccctgagcccaggtgcccacctcagaggccgagtgggagaaagacagaggtgattttgctctccctgaagctggggagggtactgctgccacggggctacaggctgatgacccaggcagaggggatgacctgggggctcagggctctatgccctctctttccatggacatttgaacatttccacgagacaaaaggaaaaacacaagaagacgtccataaggctgggcacagtggctcaagcctgtaattccaggactttgggaggcctaggtgggcagatcacctgaggtcaggagttcgagacaagcctgaccaatgtggagaaaccctgtctctacttaaagtataaaaaaattagccaggcttggtggcgggtgcctataagcccagctgctcgggaggccgaggcaggagaatcgcgtgaacctgggaggtggaggctgcggtgggccgaaacgaagccactgcactccagactgggcaacaagggcaaaactccgtctcaaaaaaaaaaaaaaaagacgtccatggggaacaaaagagcagtcccagcctgcagggacatcccctgtctgttctgaccagagcagtgtttctgattgaagtgcatgaacactacccttcaagggggctgcttgagttactgctgggcctgaaacccatatttatgaaaaggccagaagacactttgatttgggaagataaaacaaaaagatggtcccagcgcagtggcccacgcctgtaattccagcgctttgggaggctgaggtgggaggactgtttgatgccaggagctcaagaccagcctgggcaacacagggagacctgtctttataaagacaaaaataaaaacattagccagacgtggtggtgcatctgtagtcccagctactcaggaggctgaggtgggaggatcacttgagcccaggaatttgaggcgatgatcacactgtattccagcctgggtgatggagtgaaatcagctttagaaggaaaaaaaagacacgcccacatttcaaatgtgcacacacacaggctgatttccttaagtgggtgtgtgtatgcaggtactccaagctaaatgtccaccaatagggaaaagtccattgactgtcaatggaatattaacatgaaagcttttcaaaaacagtatattttatttttttttgagatggagtcttggtctgtcgcccaggctggagtgcagtggctcaatctcggctcactgcaatctccgtctcccaagttcacgcaattctcctgcctcagcctcccgagtagctgggattacagacatgtatcaccatgcccggctaatttttgtatttttagtagagacagggttttgccatgttggccaggctggtcttgaactcctgacctcaggtgatccgcccaccttggcctcccaaagtgctggggttacaggcgtgagccactgcgcctggccaaaatttgtctttatcaagagattagacttgatgtttgatttcattttcctttctatcataaacctgccactttgtcagaaaatcagcttaaaaacttccatagacttttgtccattttgacactaagagggtcacggacgagctggcagctggagccagtgtgtgagggtggtgttgagggctgggtgcagggagggggtttggggggcggctctcatgggagaccgactctgtgccttgactctcacaagggtagggtcaggatctcccccgcttcattccctttggaattgcatagtccccagccctccccatggggacccggccacagcccccgccgtcggcagctcacctagtcgggactgtagtgtgccgtcatcggtggacgccatgtcattgagtctgagcagcccccggcctctctccacccaggactgtgaggtcttgtcaaagacaaacagcttgcactgcatctggaacacagtggccgccggtaagcagggaccccagctggtgtcctgctgcagccacaccctgagagtcgccctttagcctgtggggactgccagggccagccaacgacggcctgggggccaccttggtcagttttttgtcctgccctcaagctagaacaggctttacattgtataaggggtatctgaaattaaaagaatcactaaggaaatgaaaagcaaaacaacggtgagaagcctctctgcgcactctaggacggctatacccatgtggggaagctggaaccctcacacactgctggcgggaaggccgcatggtgccactgctgtggaagagtctggcggctcctcaaactgcttaacaaggaattaccacatgcccaagcaattccattcctcggtatgtacccaagagaaatggaacatttgttcgtgttcacacacagatcgcacatgaacgtgcacagcaccatcattcacggtagccaagtctcaaggaggaatggagtgacacacatggtccgcccctacagcgcatctcactcagtcttaataaagaacaaggctccgacccccgctgcaacgtggatgaacctctggctcagcgagagaagccagacacgaaaggccacatagtgcgttgatgccatttatatgaaatgtcaaggacaggcaaaaaacagagacaggaagtggatctgtggctgccaggggctggggagggaggaggagttactgcgaatggacaatgctctttctgggggaatgggacagtgttctttttgggggcagaaatgttgtacgttagattctggtgaaagttgtctgactctgtgaatatactagaaaccacggaattgtatgctttaaaaggatggattatatagcatttgtactatatttcaatacagcagttttgtatatataaacaaagaaaaatacgagacagacacccctacatggctttccacataccccctaagtcaatctctttcaacatgaacagatgacaaagtggtaagtgggaaaaaagaacagtgctcttaagaacgccacgatacgccacccggtttacagacacagacacctgcttatgtgccacgggagaggaagcacatggatgctgcccaagccgggtggtgcggcctgaggagcaggaatgggggatgccaggaggggacggtggggtggaacctctggccgcacctgatcttttccctacgaagacaccacaggatgccaggtgacaaataatacagttgccagctctgggcgacaagagaatatgtttggtatgacagtctttgtcattc[137 bp omitted]tctactaaaaatacaaaaattagcctggcgtggtggtgcacacctgtaatcccagctactcaggcgactgaggcacaagaatcccttgaacccaggaagcagaggttgcagtgagccgagactgtgccactgtactccagcctgggtgacagagtaagacattgtctcaaaaaaaattaaaacaaaacaaagaatgtctcaaacagatcctcctcctctgaaaccaaagacatgcaagaagcccctgagcctaagctctctctacaaacgccaccaacaaagtcccagagcgtggggccagtggcccctccgtcatctcaggggcaggcctgtgtgctcagaggatgtgggcccagcccttgcggttggacccccaggtgcatggaagacccagggccaccgaggaggggccggcccctcacctgtaacacattgctctccgcctcctccccggtgatgacttccactttttccaacaaacacttccgcgctgttgccttggtgtaggcggctgccgactcagccagggactctgaaaagttattggccaaaaagactgactgattatttggcgagaggagagccatctcccctcatccgacaggagatgagagggttggttctggtctcaaggacgcctgctgcccctggcaggcctgccccggcaacccaagtggaccctagacacagccagagcatatggcctcagaagctgcagggagaccatctgggggccaagtgtggccccagactctcgtgttcgtgccgagcagtcgacggggggacagtgagggactcctccacgcctgctgcctgcgcctccccaccctccccacggccacaaggcgacacaggccctcgagttctttatcacaaacccttgctcactgcaaggcagggccctggagctggttcacatgtggttgttactgctgcgggagtcgggccccttatccctcccggctgggggtgtgaatggacccagcatcccccaagatgacctaccatgagccccatgctgtggtgggacgctaacatacctttctcaggggtggcctcctgggacgaggactcagaccctgactcggcagctgcattttccctgttggcatctgaactgacctcgtttaattttggggggctctgcagggacacaaaagcatacaaggaagagggcacttgtgtggtccttcagcagcagctctgagcacctctctgcctggcccccaacactacgctgcccccagcactcctgcccactcccggtgacaccctgaactgcctgggagctccccacgtggtccctcaggcatcactacggggtgagtgccaccagccgacagtcccctcgagccacactggtcactccgtctgggtgaggcaagactttgaacatttcattgaaatagaaaaagcacagcgtggccacgaaggaagagaagctgcagagtacttaatgcagcctaactccagacagagctagagtgaccaggcggctcaggacaggccctcacgcagtcgcaatggagctgggtggaatcaggaagaaaaaggaacatgtgtaaagaggtaggcaaaccattctagaaccctctcccaggctggctgggctcctgggaacggagatgggcctttcgtgcacccaaggccttggccgcggttatgctcacaggagcagggaggccagcaaccctgtccaccagcacggctggctccgtcccacaggacttttgtcagttggcctggtggggaggaaccatggaccccgactgccagcaggaccctgcagcctccagggaagcccatcttgggatgaagttggccctggtcagcacggaggagccgggaaaagcgaatgccagttcgtaggcagccagtggccctggccagttttcaggctgagtctgagcagggtcttccctctctcacttgctactgaaggcatccccatctcacataggacgacacagcagccctgctctccatgtccccttgacctgtggctggcgccgagagcctctggtccctgagaacattcccaacacagccactcaccaaaactcgctcgctcatgttctggccaaatacaaatttgttgctggaggcgtcggcactattggttgagttctctaaactgaagagaagatgtgcaatgagtgtggggcgtcacgtgggaacgtggccaggcaaatgtatgggtacccatggagcacacactgacacagagggcacagtggaggggcctccgccactgtgcacggggtggcgtgtcagaggcaggaagccacacacctccctgtgccattgaaaacattaacccttagctcgccctgatggaggggccccacagcatgagggaagccaccttccacctgctctacccgcccatctcccagtcgggacacgctttcttctgagacacctggaggggcagctggtccgtgggtagcattacccccagccatgtcagtcaaggacatgatgaggtctttgccccaggtgcccaaacccagaataagggggcgcctgagtcgcctctggcctgctctgttctgctctgggcatgaggtccacaagacagagggcacactccaagggctgggctgtagcctccatgggcccctggacaaccccacagaactctggtcctgtctcaggcgtccagtgaatcccaggacaaggcccaccaccctggcccacccaaggttgtgcccagagtggggaatgagagagaggggcctgagagcaacctggattctgggcctgagtcgggcacggggaccacagacccctctctggcagaagccctcgcggccacctgcatcgccatgccaggctggccgctgacaccgagacacacacctggaactgatatactggaggaaatagttcgttgcggttggcgtgtctgcgctggggtgtccagcattctccatgtcggcttcgtccacgctctcatttatcagctgggaatgagacggagcgctcagtaatcgggggtgggggggtgcctggagttccacagctcagtgtctgcagaccccctgagctgcatggagctgctcggagccatgaaccctctcctgtacccgcctgtgtgtgtgcgcgtgcatgtgctggggggcagggctataatcaactccatcaccttttgctttaacagttaggatggaaagagagctcatgaagctccaaggagccttttccaccttgttacaaaaccacgccttgttataaaaccacgcctaagctggcctctcggtcaatgcttcataccaataacacaacgttacaaagctgacgttttggggggtttactatgaacatgatagaagcagaatttcttgagggcctctttcctaccagctgctatgctgagtctgtcaaatgcacgatctgctttaatcctcacgaggcctgggagggggatgttagggaccctgtttgaccaacaaggaagcagaggctcagagggttaagaaaccatggctctggctgggcgcggtggctcgtgcctgtaataccagcactttgggaggctgaggcggcggggaatcacttgaggtcaggaattcgagaccagcctggccaacatggagaaatccccacctctactaaaaatacaaaaaattagctggatgtggcagtgggcgcctgtaatcccagatatttgggaggctgaggcaggagaatcgcttgaacccaggaggtggaggttgcagtgagcagagatcatgccactgcactccagcctgggcgacacagcaagacttcgtgtccaaagaaaaaaaaagaatccatggctcaagtttgccctggaaggagaggctgggatttgactgagactgcgaagtgcacgtaagcctctgacttctgcaagaagccaaccccaccaaattcaaagcagctgtctccccagactcaaggcagagattccacagggcctgaactccacaggccaagcccttccccgcctcttgccctccctccttggagggaacagcccctgagggactcattattttgcctaaagccatggcaacagcaacatcaactttccacgtttctcgacttgggcttctgttggacggtgagtaacagaaaggaaagcagaaaacacaagccggtgctttctgcatgctagagaggtttttgtttatttcagggccctccccgtcgacactactgacatgttgacactgggcccagaacattccctgtggtgtggctatcctgggcactgcaaggggcggagtggcatccctgacctccagaagtacctcccagttgtgacaaccacaaaagtctctagacacagccaccgataccgcctctcgagctttgaaagaagcttcttgccagtggagctgctagagatgccgtagcacattccatgtctgtggctgggaaaggtggtgctggctgaccctggtcttcctagagtcccagtgcatggtccagggccactgtttccaaccactgccatcccttccccaccacacaatctccaaactaggaccacatgtctggagggcagccaagaggtggcagacgctttgctccctttcaggagagaagacagtgttgtcaccccaccctgccccacttaaaaaaaaataaggtgacagttcttaatgggggcgattctactccacagggaatactggccacgtctggggacatttgtggttgtcagatgtcaggagcattgggtgggtggaggccagtgatgctgctcagcaccctgcagtgcccagggcgactcctcagaaactaagaatggtccagccgtaatgctgctagtgctgaaacagagaaaccctgaaatacgggaacagaaacctctgggcagagctgagaacactggaccgtgctgtctttcttctctgctatgaaagcctgaggcctcaggttcagtcaccttccctgtccccgctaccatgagaaccagggaccctgacttgagaagtcactgcaggtgagggctccgaagcctgggctgctggtggggaagtgccagggcccagcacacgcacaccagcagcagactgtgccgtgagccatggggctgcctcgctaacaccttctttgtcccacgctcccctcccctgttaaaaggaaaatctacctacttgcctgctgttgaacctggggaaggcataaaaagtcaatgtgctggttcaacagctcacataccttaactctgtccctcaagttctgcccaaatacaaaggcttgctgtgtggcggggtcttttttctcacaggcttcctcttcagaggcattgctggactcatttttctggggctctttctcctatcaaaaaccaaaacaaaacagagtaatcaaaaccagtgccacacttggcccagacggatgcccagcaatcccacaccagatcatgtactccacacgtctcctctgcatgtgcctgcactcccagctactcagaaggctgagacaggaggactgcttgagcctgggagttgtagtgagctgagatcacaccactgcactccagcctgggtgacagagcaaaaacctgtctccaaacaacaagaaacacctgtgccctgcagaagccttagtgccggcagaggacaggaaataacctggttgctcatcattggccaaggaatgaaataatttacaatagaaaatatgggggaaaaaaagtacagcacagctattaccaccgagagggaggtaggcctctgacatgcccacaatacatggatcagagaagagagcagcttgtgggacacggaagtgcgattccatttctgttaaagccaatccagtcccgtgtgtgtggtgtgtgtgtgtgtgtatgtgtggtgtgtatgtgtgttgaggaatgcccaggaaaataagtcgggagagagaattcaaactactgacggaggttacccgggaacctcttagctggagggtggctcctgcttgttactttctaggatttccattttgtgtaaatattttcaacatgtaggcatgacttttttgtaactaaatatcctaagaccaaatgcatttatcttgagataatggaatatggagttgctagtaatttgtatatgtctttcctataccacatgatgaaaaaggtgttgtagaatttgaaaagaaattttaaaaggcttttggcagatctttggagtctctggcgatgtgtacagtggacatgaacgtgaggcagggagtgttttcctgggagatgtcgtgaagggacctgacaaccgtgaactcggaggtgagaaaggctgcaggcagcttctgactggctcagcgtgtccagcgggcagggaagcctggagttacaatgccaggcccagaatcagcggatcacagcgctgagggcactttctggtccaactgtgaaggaagtgaaaagtgtaaatgtttctctactgtgctccctagaaattctgctactgctgacttcacgctgcatccttgtgcctgtgcaagagtgaacgtggctttttaaaattaaacacacaacgtgtttggcgacctggaagtcctcagaggatgggctaatccccagccccactggggccgcctgcatcccgtccagcagaaacactccctggctcttggctttctgcgctgtgtgccccctgctcacaccgactggtgctaatcccgggtgggtggagcccacagagtcacctgagatggggcaggcaaacagcaaaatgtttctgactacagggtatgtctatgacctggcggagcctgcttagaggattcgcttaaactgataaacgaatcccgaggcctgtaaccagtctgagactctgtgtgtgtgtggggcgggaggggaagcctcttccccactttcccaaagacggtaccaggagttcccccatgggtcgcccccaacatctaagccctccttagaggagatgcctcatagctcacgttcccgatgagcagtgtgtgccatgttcatgggcggcttggaaaagctcggactcctgctgtagggccagagaaggatacacacagcgagcctggcgaatctcaacagtactgggtgtggtcagagggcagcgtgggtgtggccgcatggctccaccccagacccacatggagcagtggctttggagccagacgcaggagctgggaatggcagccagcacatcacaacttctgagctcaaccatttgggaacaagctgtgtgcactgctgagaaggggctggaaccggcaggaagacggactccgtcccctgggatgggacacagcaaggcctctccagtgaggaacaagctctcggtagcgggtgctaccaggtcagcctgtgcactcaccatcggggacaatcagagacactgggagatggcgggacgggctgggtcacttctaagtccttctccaactcagaactgcacacctgatctgctcaggagacctcagcagtcaaagcttccaagccgcagaatgcggtggaaatgatccctatttccaattcagcaaactcgtttgaaaaagggcgtgaggatgttttcaaatttaattgtggacagccattttcaccctttgagccagaacatctactggggatggagggtataaaactgcaggccatggacacagagcggaaaataaacacaaagatccaatctggcttttacacagaagataccacatggtgttaccctaattctgacttcaaacccatctctgccaacttcaaaggaggctcttcatcaaaggcccttatttcacagtggctgtgaaacacaaagcttttggcccatataatccaaaccatacccccgcttaaatggaactatttctttttttaaggcagggtctggctctgtcgtccaggctggaatgcagtggtgtgacctcggctcacagcagcctccccttcccgggctcaagcaatcctccagcctcagcatcctgagtagctgggactacaggtacatgctaccatgcctggctaatctgtgtattttttgtagagacagagtcttgctatgttgcccagggtggttttgaactcctggcctcaagcaatccacctgccgcggcctcccaaagtgctgagattgcaggtgtgagctaccgtgtccggcctaaacaaactatttctgagatgactcccaaagaaaaattttcaactggaaccacacagataggagtctctgaggggtggtttgggtgtggacacagagaggggagacattcctcatgttaaacattgcaagacacccatcagtgacagccgttcctcgggccctagtgactcctcagagtgcagtggttcaggtcctccctcaaggatcactcccgtgagacatgtggcggtcagccttgggtaacaggcccttccggcagaactctgggcaacaggtccttccggcagagcttgcttgggagacactcttcttctgcctgaccagcaagaccacccttgggaatctagatctggtttgtcaggtactgttatttagagcctactgagcaaatccagagagccttacaataggcccacgtggaaactgcttggaacaggtgacagcgtgtggactccacagcatgctgggaaggctgccctcccgctcccaaggggcctagcatgcagcgcttccctgcctcaggacccactgacctcaagtgcacacacctcatcggcagcttcggaaggacttctccatgcagcagtgtcaggggatgctgcgggcactgcccccgtgcagtctgctgggaggctgaccccgttggtgccactgctggggactgtgggagggaaggagagtggggaatcacaggtgcttggcggccctcccacccccactcacatagctgaggggctgggccacgtctagtctagggcccctcccatggtaaagcccacagcacatgtctcctttttaaggaaggacctggtatctctacaaagagccaaaattcttggatttaaaaaaaaacaagagaaacaaacaaaaaagagaaacctgccgggcacagtggctcatgtctgtggtcccagtgctttgggaggctgaagcggggagaatgcttggggccaggagtttgagaccagcctgggcaacacagcaagtcctcgtttctaaaataagataaaacaaactggctgggtgtggtggtgcacacttgtggtcccagctacttgggaggctgaggtgggaggatcgcttgagcccaggagttcgaggctgcagtgagctatgattgcaccagtgcactccagtctgggtgacagagcaagaccccatctccaaaataaataaataaataaataaataaaatgacctttcaagtttttaaagataacctgtgaaaattgaggctgaaattctatctgcaaacacacagggataaatctcattcccaggagccggcctgcttttatgaagacagtgaatgaacaaagcaggtttcacccacacagtcacactcagccgagagctgtgaggaagctgtggagccgcctctcccttctccgttgccagggctcaggaggcttggggctggagacggctggggggtgatttaaaggatcatcttccctgatctctctgtatttctggtgcattcagcagtcacctctgtcgcaacactgctgtcccgggtgcgacttcgggaacgctctaccctgccgtctgggcctgggcgccagggctgctgtttcttaccagtctgggacagcgcctttggctgcggagcttgtaacactgccgggcgaagcacgctccgctgctgctccttgggcttctggcttggcagacctaggaacagaaggcggccttcccagtgcccgtggacccctgcctgcccccaggcgcttcagagactgacccctggcatcccatttcatgccccttgcaggctagactttgcagggaagcacttttttaaaaacttgaggtctttttttaacagctggccaggagatctggctactgttatttttacatgtgattacatgaaactcccagtgaccgacgcctgtgaattaatccagttagcacagtaacgtggcggggcgccggcagactcaacagtcaagtggagactgtgggaggagagcagtgcattcacaggcagctacctggaggctcaggactcggtgtggggtcacgtacaggcacattttgcacctgtttttcaaaacagccatgctgaggaagtccctctgccaaaggcagatgggacaaggacccttgcatgtgccctgccctgtgcagcatccccggcagcctcactagcagccggctcactagcagcgcgccgctggaatgcagccaccctgctaactggggcgaacactgtggtatgtgggggccagaacatgaaggacagacaggctgaaccaagtgcgctactgctgggcatggagcccgcccgatgcaccccgcctagcctgctcccgtgccaccactgcccacttttctgaacacacgacgctcacagtcaggggtcccaacctccctgctcagacagcctctctttaaaggaactttccagggctcgtgggtcaagttacaagtgatctttctagaaagcaggctgagcccgcggtgccctggtgtggcctagcagaggtctgaaaaacgtcagagagccaccccccgccccagggaggtagacgacctacctgcgctgggggcttggccgtggatcagcgttggtggcttcaaccggaagccactgctcctttcctctaaaagcacaagacaaaatatcaacagcaggcctgcctgggctggggctgggcctggggggcaagggcaggagaggactatggtcttggcctcagtgacttcgggcctggagaaccagggagaacatttccaaattacaacagaagtctcgtccgatcagcaggcctggaaggcgcctggaggaggggagagacaagggcaggaggaacgatggctcttgggccagctgctgaccatgggggcaggtggggcgtcagccgccctcccagctgtctatgacctgctgcaggctcaggagccgagctgctcagcggccctgtacctggctctggagaatgtcagggagccacggaacacaggcgctcaggccccacttccctttcctagaaggcttgtctgtcagaggatgcggctgtggccaggaagaaccttggcaccactacagatgtctgggaagtgagacaggtttttgtgatgaaaaggtcaaaggtggcacacagtgagcctgcctcccctttccagatgtgcctgcggagcttcccgtctcagtgagggggcactcctggccaccgtggaggaggccagctccccctgggccagagtccgggctgacaaattcacaaaactagagggaaaggtgaatgcccacgagctcctgggatggctcgagagcccagcctcgcccagccacctgtccacatggaccccttcatctgtgtgtcttggcaactgtgcccatacagggagtggggatggtggtctaatctgatccacaacaggaaggattgtcataaaaggcctgtgactcaggcaggcaagcctgttcctgggcaaggcacagagactgtggcattatggctcctggaggtagccctgcgtttgtgctaagcttcacccccttgtcaagctacaggacacaagatcaatatacaaaaatcgattgtgtttctaacactagcagtgaatgacccaaaagcaaaattaagaaaataattccatttacaataacaccaaaaggaataaaatacttgggaatacatttcacaagataaaactataaaacaatgttagggccgggtgcagtggctcatgcctgtaatcccagtgctttgggaggctgaggcaggaggactgcatgagcccaagagtttgagatcagcctgggcaacactgcaagaccctaactctacaaaaaattaaaaacttagccaggcatggtggtacatgcctgtagtcccagctactcaggaggcagaggtgggaagatcacttgagcctgggagcttgaggttacagttgagttacgactgtaccactgcactccagcctgggcgacagagtgagaccttgtctcaaacaaaacaaaaacattgttggaagaaattaaaggtgtaaatcaaaagaaaaacaccccctcatgctgtctgattgcatttctgtgaaatgccagactaagcagaaaggagctgagcggttaccagggctcaagggagggggttgggggcaggctgtgactaacagggatgaggtttctttttgggatgatggaaatgttctaaaattaatcacgtgatggtcgcacaactctgtggatgtactaaaaccactcaattgtacactaaaacgatgacaacaaaacccaaaacaccttgtcagcccaaattttcagactccaaatcaagattcagcaggccaaggaagacccctctcccgctgtgccccggaggcgccgctgtgcctgggcagcaagaggattgcagcaacccttcttactataatagttgtatgagggagtccagccccaggggcttctggcagcctgtgttagcagagctggtgcctctcccgtaacagactggtcataaaaaaacaaactcaggagagccagatcctgcaggatgcgggggtgagccgccagatgttccttttccgaaggaaacactcaattacatttccaaagcacggagctatgcagaagacgactggcaatttagatacatttttaaaaggtcaaattcacaatttagatagtttttagcaagctcttcaagctggctctccacgctgatgttttggtcacagactgactactgcccttccacactccgctccgtgcagcgctggcgctaacgctgaggggagcctgggggctggcccgagctgccaagcggaagcaggagacttggataatccctgccaccgacctgccactagtgctaggcccagagcgtggccctctccagagctgcagacagacaaggcgtgctccaggggtagccaaaatctggaggtccctgtcacaggccctgctccacgaaaacaagggtggtctcttctcattccttccagaaattttcttctgcaacacaggtcgcaacacaagctgctgaatcatggccagagcccgacgcctgccacatacccaaagggtgtgggcctgtagaggatgctgcaccagtctctgagggatgcgcatcactccagagaggaagaggacccctcccgccggcagcctttgccctcctgggaagctggcaggctccctgtctgagggtgcttttcgcctgcctcagagagccccaagtgatgtctgtgggaagccatgcttgccccccagggagccccgatttaaccagggaagggatgggaatgagactgtgtgcatcaaatgctgagaaggcagcctggctggagctggggtctgtgcgtggacggcgctggtgcagggtggggaggaggctcagccatgcggtgggcagggagtgatgcctgatgcacagaggacagagggtgccggtttcttagtgccagaagagggaggaatataccaagggaggcacccacgtgcccctggcgtcatctccacatgcaggcaggcaggcagaaagtaagagatcatgtggacaaaggtgtgtccccagctctgtccgtcatctccacatgcaggcaggcaggcaggcagagagtaagagatcatgtggacaaaggtgtgtccccagctctgtccgcggagggccgggagcagggctacacctgagtcagtgagatcgcagtaccgcacggagtgatttcagaccttggtttctaaagaccatgttccctgaagaaccagcgtgcctctgagaaatgcagattccaggactgggatgagaaaagaggctgagccgggaggctcttgttgtgacaaagtaagggcagtgctcaaatgaacaacggggacctgcctgacagggcttccactggccaaatctgggacaacctgaacattaaataaaaaccagtaaccatagacggtcacccactgatgccaacagaagctcgcctgtctatgttgacacaatcgatcaaggaacaagcacgtggggagaagggcaagctcctccttccagtgaacaccactaatcaacgcggcagggatggtgctcagagtatcccacgggtggtgagtgcctgtaatcccagctacttgagaggctgaggcttgagaatctcttgagctcaggaggcagagggtgcagtgagccaagattgtgccactgcactccagcctgggcaacagagcaagactctgtctccaaaaaaaaaaaaaaaaaaaaaaaaaaaaggaagaaaatcccatggggcagtcgtcagcgggaaacatcactctaaagacatcactgggcgcgaacactggagggcaggagtgtgatgaggtacacacagtcccagagtctaaagtgtctctcagaaaccatccagcacaaaggggaaagtagctttacagtggtgaaacctggcagacagcaccctgatcgaggagcacggccaccccgtgctggtaaggggacaagtgagtactgtgcatggcttctgtgacattctcatccaagatgccacacctgggtctcaccaccaggacatactggacaggccccaactgagacacttctacccaacagctgacctgtaatcctcaaggtcatgaaagtcaagggaagcctgaagacctgttcccgataaaagtggaggtatgtgtggtaggaccagggtctcagtccttttttctaatggactcatggagctgactggagaaagctaaatggggtcttcagacaaaagggacagagaaattcttctgtaagtgttaaagcttttcaaaattaaagctaaaaaacagaaggcaggcagacaaggatgtgaagttgggtttgcagaactgatgtgtggctgatatgactgccttttcatgcgtgagggcactggggctttaaaccatgccgcgtcggggcctgcgaaacagctgccctgctcgaggctggaggggaaaggtctgtggggagagagacaggagggaggccgttgctcacagacctcagaagcgatcatgagatttgtaacagagctcagcagcacaaatgggtccagacacacggctttagtaactgatcacctaaagcagaacctgcctcaccgtggcaggctctgtgcccccatccagaccaccacctgctaagcgacaccccaggaataaccaacatcgtgcccttcctgaggaccctgaaacaccaagcccctctgcaggatgagaccaggtggtcggctcaaaacagtttgcttttagagtcaaaatgccttgttgaaacggggccatcaactcaatgctgagagttataagaacccacctcttcccttgacacggacatcacgccagcagctaacttatctcacaatgcttttgaagtcggcaatgaatttatatatggtaggttgggttacagaattcaggttgttaaactcgcttgttaaatcttttatgaggaatttcagccacgtgggagaaactttcaggaaaccttggagttggttctccagtgaaagaccaaaaaggcaggctccatattcttcagaaagggggagcggctttccttaaaattttaaagctgggggccagacgtggtggctcacgcctgtaatcctagcactttgggaggctgaggcgggaagctcgcttgaggtcaggagttcgagaccagcctggccaacacggtgaaaccctcgtctctactaaaaatacaaaacattagctgggcatggtggcacatgcctgtaatcccagctacttgggaggctgaggcaggagaattgcttgaacccaggaggcagaggttgcagtgagccaagatcgccccattgcactccagcctgggggacaagagtgaaactccgtctccaaaacacacaaaaagttttgaagctgtgattaaacatatttatctaggtaggtctgagcaaaattaatgtgagaatgcacaaaaaagaggtctagaaattcaccaacttcacaggcgttacctttgggatggcagggtgagtggggaaggggcagggattctttttagttgaaatatttctgatttactttaaagaaaaaacaattatgggccaggtgcggtggctcatgcctgtaattccagtactttgggaggccgagacaggtgcatcacctgaggtcaggagttggagaccagcctggccaacaggtgaaaccctgtctctactaaaaaaatacaaaattaccccggcattgtggtgtgcgcctgtaatcccagctactcgggaagctgaggcagcagaatcacttgaacccgggaggcggaggttgcagtgagttgagatcacaccactgcactccagcctgggcaaaaagagtgaaagtctgtctaaaaaaccaaaaaaccccaattatgaatgcattacttgtataaaattttgaaaaatgagtgatacatttcttcacaggttgtttttagaggacttagagctccatgcaaccaggccctgcttgcagaaacaaacatgagggcttatgaagcctcatctcacgccagatccccagactatgagctgaagagttgggggaaaaattttaacagctgaagaagaactgactttaaatgcccgctgaagatctgattttcccacaccaattgcttttcctcccaggagaacccccaggccgggcgggaaggcagaggggccggggctcacttggctctgagtcggaattgcctgcagatggctcgcagaagcttgatggcataaaaacattgttttttgaaactgttgacaaggaggtgcaggcgggggagggaacaagaggaaaaacagcatgaatgggtggggtggacgctcagagatcacctctcccacctgaggggtggattctcacgtcccacgggaggagacggaacagcacgcaaacagggcattcagtctttcccgagaacagcaaaccccaagactctttacagcactacgagggtctccagcccgacggccttgatctgtctgatgactacagtcaactctggtcaactgggggcacccccttgtccctgcacctctgcaggggcagccggcaggggagatatcagatgctccaggccacattggaggccctgactcctcctcacctgtcaaggcttgtccatggggttccccctcccccacctaagatcttccttcaccagggcaactgcttcccagggtgtgggccagccaacaggtttccacaaatgaagtggaattcgtaggggaagaactcactctacgcagaatggaaccaaagacaacactgttcaaattattggtgcccctcacgcctccagttaccctggagagctgagtgtctcttgggggctgctgcgctggacgggaggtgatttgaagagggccggggagaagaatggtggtccctcgcctctttagcctacattcacagcccaaacacctcctcttctctatgctggttttcgatacagcaagcatggttcagcagtgggcagtgagggggaaggaataaaatcaacgagcaggaagtggagctccctcattccacagaacacctatccacaggtgcaaagatccttaaattaaaaggatgccaactgcagcctggactgcaagccatctggacagttccgcaatatccagtcagcagatgacagtgtaatagcactggaaaacctaatgcagctgtgcaaaaagacgcggccatgtccaaaaccaacgtgatgggaaaagggcatgaaaacaagggtgtggaggggtgacttgggaaggaccctggcttcctacgctgtgtgttcctgtaacgcatgcgtgacttctgtaagcagaaacaacttgacatcctgaaggttcaggactgtaaaatgatttacatgaactttccaggaatggatttcagttgggtaaccagagaacctgtctaaacactcatgtatgtccaagttggcactacagacagctaagacagaggccacgagacaatgccagagtgggaagtcaagacggggacgagagaatagccctgcagtggcatttaccctcaaatctgcagagttgtgcccatggcaggaggccgggctttctgagtgttatattaagtagtgctgacggcattatctgcctcaggaacctctctcctgtaccagcctgcatgagtccccaggccgacctccaggcctgtgctcagaccaggcctcacgtccagggccttcaagccctttagcctgccctgctccacagtccgagcctggcccacccttccaggcccccgcaagctcctctcctctgggagttcacagcatcacacacgggcctctgctggggcctcctggcttgctggttaccgtgtgtgtgtgcatgcttgtgtgtacatgcgtgtgtgtgtctgggctactgcactggactgcccgtgctgggcatgcagctgaggggttgggagaacaccccacccctaaacccccagtctgtgtccagccttggaaagaggagatgtaattaacaggcagaggccccaacagggctctcagtagtcaacccctttcctccatttcagagggacgatctcttcacagtcttcctcaggccaccaagtctcaccatgccgtcagtgtcactgattcgagacgaggacccctgatgctgcactctggacaagctctcacctcactcctgacagagcccgagcctcagatcgactctaaccggagctgggcaggaaggacacagcagacggatgcgcggcactgaggggaatggcgggtttgtaagcataaacgctttcaccattccgtaagtttgcatattttacctgactgtgagggtgggaactgggttaaagaggatgttctttctcgcttgacaggagggcagtaatttccatcttctctgtcagaatctacagaaaatgatgagaagaggaggagaaaaatcaggttgcttctgtctttaaaactgaagatggtcaaaggtgttagagagctccttaccttctccgccttcaggactggagccgccagctgacctctgaaacaaggagcacacagccggggtcagagggcatcaggctcacggcagccgagcaactctcggggccgtaacaaatatcccaacatgcaccacgggcagctagttcccagagcccagcacccgaatgagagccaggattttagcctaaagctcaaacatccccccgatgaacctctgcacccagcttcacaaacacatgccaaggaatcctctcagtggctgggaaagcatccgcagcacccagatcagtttcttgtttctccacaggttacgctaactggcctgccacccctaaactcaaacacagccgaacctcatctggcccccgttcattctgccaagagctgaaaagcgaccctctccacccttgagggcagcggacttgtgtaaaatggtcacatcacaccggataggagcgatttcccttccttgccctggaacattctaccatgcacatgcttgtctcagggtcggctgttattcccagagcaagcaagagcttggatgttttggaccaaagcccacttgcgaagtgtttagaacagaaccatcaaagacaaagcccagtcacaggctgagggaaggctcctgaagaattccctattccacaaactttagctttagagtgtgaacaaccagcaaccaagacttaaaatgggctcatgaccagcctgaccaacatggtgaaaccctgtctccactaaaaatacaaaaaaaagtagctgggcgtggtggtgcacgcctgtaatctcagctacaggctgaggcacaagaatcgcttgagcccggtaggcgg[136 bp omitted]gcactttgggaagctgaggcagaaggatcgcttgagcccaggagtttgagaccagcctgggaaacatggtgagactctgtctttataaaaaacccaaccacataaaaatcagctgggcaggggggtgaatgcctgtagccccagctcccagggaggctgaggcaggaggatcacctgagcccggggtctgaggctgcagtgagctatgaccatgccactgcaccccagcctgaaggacacatctcatctcaaaacacaaacaaactcaaaacttaacatgaggagtgtttatcctctcccccaacacaatccctcatttatgtcctgtctcagaatttagcagcccaaagcgcaccgatgagtgagggccgctcctcctggcgcgctccctgcaagagcaagcagaaaagccaattttcttattttctaaaatgctcctcagaggtcaagtttagccaaatgaggcccgcctgcctcgacgagctgctggggcttaggggaggtgatgcatgtgaaagtgctttgcaaactgcagagtggcctgggaaagcaaactgcaataaataaaactgaggagcacaggagccaaggcagacccccctcaagtcagggcgatgcattttcccataaagggccagactgtcggtactgctggctttgtgggccacatttggtctctgtcatatattcttgtttttgcttttataatcctttaaaaatgtaaacatcatcttagcttacaggcccaggcctggagcttgtggcagtgagagcccagagaaggtaggaagttgacttgaagtcacatagctcgttcacgacggtcagaaaaaaagctaccctggactttctcctcccgtgtgagctgacaacatgggtttgtgtgggaaaagcaagcctgggcttcttgcttgaggcccgtgttctgagggggctttggaaatgctcccaagggactgtacgagtgagggctgattatcactatccccacgagatgacatcatcaaagtgtgtgggaaacacaaaatccttgtaacacaacagtgggttctattagtcactggggcaattgtgaaaataccactgagtccaaaacgcaatgccatcaagcagccaggccctagagtcagtaccaactccggccaggccaaaagcacgaggggtgcagaggctgcctggtccctgctgcctcttgaaggccggaagaactcagtgtattccggctctgccattttctacgggtgaaaccttaccttgcccagccttcggtctcctcacctggaaaacagggatgcgtgaggtgacaggcagggcaggtaaggtgctcagcccagtgccctgcacgctgggagcagatgattataatgctcgtgacccacacctgatgagatcaaactcccaaccgatgtaaaatctggaggctacgctgggggcagggctttagagctcaaggcaggcatgaatagggagtcaggggtgtggagtgagtcctgggtgcagccaggaggcgagggacctggactgggaacctttctagaaatgccagagcctggggttgcatctgatagtgctgagctgtcaccaccttgtcatcccttttcttgggtgacatctgtggggtgggtacaggctccagctatcgcttgccctcatacttagcaaaggtgacagaagtacagagaagcagcatctgcccacccgggcagccaaaacctttgctcatccagccaagcctgggcatctcatgcctggggcagctactgccctcgacgggcccttacatcagcctcccagcacaggcagctgtgagaaacaacacctgacacagcctccttgccctctgggtaacccatgccctccagagccctgtaggctggctttggcctccaaatgctctgtgcaggtcactgtctgaggccagcagcctctgcacagcccgatctcctcggacaccgcactgctcgcctcacctctggcttccctggcctcaccagtcctcccatccattcctaacagcaggcccaggacatccccacccccaagtcccatcctgtggctctagacttttctctccccttttaatccaacgagcctttcaactgtaccaaaacccttacacggtgtcctccctggtcctgggggatctgtcccttcctaaatgacttctgggaccaggagatggccataccctctctggcctctgtagacgacctgctctctcatccagtgacgccctccttttccctcaagcgagaatgaaccccttggtgaggtgacctccaggccccttatactctttctctgtggcttattctgatcctgggagttgtgtcagggactccactagacttaggaaggaactggacctcacagtagaagcccgtttagcatttgttcaacaaaagacactgcatcccaggccccttgcaggccacggagaagccgaagacctgagtccggccttacagaaggaactggtccccgagctccctcgtgtctcctcacccctgcacgggatgtttctcctgacatctccacacctaactctctggctcagtggttatctaggttaatttccacatgtgtcaatttcctagtttccgtttttgatttccaattttatctccttgtggttggagcacatactccatattttgatcctttaaaatttgagatgtgtttggtgacctaacaaatggccccccatggagaattttccatgtgcacttgagaaggctgtgtaccccactgtttgggtggggtgacctatatgtctgttaggtctgcttggtttttgtgttgctgaagtcctgtttccttactgatcttgtctagatgttctatccattactcaaagtgtggtaccgaagcctccaactcttacggttgactcgactatttctcccttcagttctgtccgtttttgctttgcgtattttgggggctcttttgacgatacccatgcctctcagggatcatggatgccatggatgctctccccagagcagcatgtccaggtcaagagtgtggctccggggctcccaacagtctcttggggtctactcgtggctctagaagcagccccgggaacactgtggtgcccccaggcattctgcactcatcctccccttcacccaccacctccaacctgccagcaagtcccattagctctagccccccgagaacgtacctttccctcctgcctcggtggcctcctcaggcacagggtcccctctgccaccaggctctggccatgtggcctcctgttttctgaacatgttggctgctcctgcctcactgagtgttgctcctccgtgggcgccctccctccaggtccctgcgtgtctgagatgctgtgagcaccacctctagggtaagttcatgctcactccctatcccagcccctctcgggagctaccctgttttgttctatcacatagggaaatgatctcagaggtgtctcctacaacacagttcattcacgcgacacccgggacacctgcacagaaggcacttgctgaggacttgctgcgtgggtggagtccgtgtcctccaccatgtccccttcagtgaccttgagaagaatgggtgcctaggcagacaagattcagatgctgcctgacccctgatctcaggagaccctcaaatccgtgccccaaatatcttctaagagcctgcctgcaacaaagtggggggcctcttggtcctggaaaggctgggaagccaaggcttgggaagaacaacacaggaagattcgacaggggaacctcctgccagcaactctccactaagacccagcggagggaagcaagaagacagaacgcgtgcctgtggacagagctcttctagaatcctaacccgctggccacgtgaggtgccgcctgccctctgccccaatccaggcctccacaccctgcaccttgctgggatggagggcctctcctctcaggagacgttggaacttgctgtccagctggcttgtgctgccttctccaaagcaggaaatggtttggggtgaaggaacctttaagccacccagccctgcacacagccaatgccagctccacattttccatttcctagactcagcagcccaggagtctggacctgtttggtgtcaaggcagtctggggccacccctcaccccaaacaaggcagtgggtcctcaggggttggtcccgaacaatgcctgggacacactcagggtcagcccccagaggtctgcaaccagagctcaggaggattttaagagcaagctccaggccgggcacggtggctcatgcctgtaatcccagcactttgggaggcctgggcgggtggatcacctgaggtcaggggttcgagaccagcctggccaacatggagaaaccccgtctctactaaaaatacaaaaattagccaggcatggtggtgcatgcctgtaatcccagctactcgggaggctgagtcaggagaatcgcttgaacccaggaggtggagcttgcagtgagcccagatggcgccactgctcttcagcctgggcaacagagggagactctgtctcaaaaaaaaaaaaaaagaaagaaaagaaaagaaaaaagaaagaaacaaaaacaaaaagagcaagctccgaagactcgagcttagtggggaggagcgaggacagaagcaggacataagagccccatttcctcctcctcctccacttttcccaaactagactctactgctgcgaggcgcagggcttcaggatgacaccggggaatgctgggtcagcatccatttcaacaccatgatgacaacatcccagagtaataataaggaagcagaagagaaagaagaccagagggccctttgacttgtctctctggcactgggacagcaggagtgaacagagcaggctcagaaaagatgaagcagccctcccgcggcttgggctgcaggctggtcgggagcgagcactgtgagtgctgatcatgtgccccacgtccctgccggcggggtgggggctggtggcgcaacaagctccccaccggcagccatagggagcttgtgggaagtaactcaattctgtgaggcgcatgagtccctgtcactaaatacaagacagaggggcacatcccatctggaatgggaatgcaggggtgggaagcttgttctttgcctaaggaatgaaacagtgaaaatcatggttgtcacatttattaagaattgccctgtccaaaaaacatgggtcttgtcagactgtctggtgtgtcctcggtgccaaggcggcccagggaaagggacaaagctttcagaagccgactccacagacacaaagacgaacaaggaagaagcaggaaggaatggcactgtttacctggtcccctaggaaag[142 bp omitted]aaaccctgtcactaccaaaaataca[201 bp omitted]caagcggtgtaccagggcctcagtgagtctggcaagttagaaaacctggctggtcatggctggatacctgggatacaaaataaatgatgggccagttcaatgctttttattctgtggcagaggcaaccagctcagaaattcttgtcaaaagggcaggccctgagaaaagcaagtgagaggtggcttccaaagttgaggggtgctgagggtcaaatcctgtgcaggggctggaaggtggggggaagctgtctggccagagggattcattccagaacctccttaagctccctggtgggtctaataaacatatctgaagctcggcaggtccttggcagggagcttcagtccagtacaattccaccaggctcgcagtgagtgcccagagctgcctgctttctccacatcaaacagagaacttaatcgggatgtggtttggtcttcttcagactgtcttctgaaagccaggaagtctgatatatagagactttttcctggtactgactcttccatggccagggttctgacgagactaaaagatggtaagggccctttacaagtaacaattcagcgcaccactgtttatcatcaagaactctcagctttatattccccccagggaccatggaataaagtgaacagactagatgtgacggatgagacctgccgggtaacatgggggtggtttcctgaacaccagtgtgatacagagtgagacccaaatttcttctgatgcaaacgaaaacggtctgagttcacacacacgaaaaaggctcaggccaagaagcagttggcatcgggttccatctgacttgatctatggcctaactaacctaaaataaagtttactttgctctgagcaggcccgattagtagagaaagccaattaacaggagcccttagcaaccagtcagggtgttctctgcagacagcctgagggaagagccctggtcagctcagagctgtcacaaggggcttgacaatggctctcctggggctcctgaaagtgggtgtccaaaagttacgagtgctaaaactacaaggtgcatgttatgcacatggccaccagagctacattggaacatttacatactgctctatgcagcctccaatcctggctctcccacggtgcccacaagctcatcccaaggctccctgccatacagcttcaccttccacctgccagtgtgggggactgcttgaatttctcaggatcagagcctcagacccaaagtccatgagaatcaggatgctgagatctacctgggctggccaggccaaagagatgaacatgtggacgaggtgaggcccctccagacactccaacatgggcctctgtgagaagtacgcagggcacagaacagcgcgtgtgctcttgaagagcacctgctgtcacaaaaactctgtgatgcacttgtttgctactctcattctagaacctgtcacctctgcagctggagagtcctatgtgggctgcatttttcaaacccaggcacctgcagaaggcctctgggggggaccctaaagaccatctgttcccagacagctgaagacggaaacctgagaacaccatttcctgtgctctcaaagaccagaggtgcagtaactcaccatacctgactcaggagaagtttccggcagccactctgccaacaaaagaaggacgcagccacctcctaattcttgctctggcggcagtcacgtgcgctcatgggagggctgtactcccagtgcactgtgggtcaagtgcctcctggctggactccttcccgcggctcccgtgtctcactaccccaaacccacttttgtgccacgaaggccactactgccgttacctcccccacacccatagcctatggcacaagtaaagactgttgcttctttttccatcacacactgactcctccaaaatgttaacacaggactccaacccacccctggctgaacagtgcttcctaagtgtcctgaggtttggtggctgtagctgaatgttaacagtttccttaaaaaccggggactgttgtgtgctagaaagaacgctgaggtccgggataaggtttgggaccgtaccagcctggaaggctgcctggtgctcaggcggtagagctgggtcccttcttttcttgttaagagtcctttttccctgtcctgagaataggggtcttctgtcatgagttacctacaggatggagttttcaatcctgaatgtaggataatgtttacctttcccaatttatcaaacttcaaaaacccaagacatttcttgttcttgagagttcacaatcttctccacctataatcttcaaaaggcttcttaatacaaagataaagggctcaggggattccttctgggttcaaaggaagagtcttttcttcttcctgctttgattgaagacaatcagttcactgccttaaccacagtccaaacacaatcagtcttgcaaagcaatctgtgttggagagtgcctcttcctagatatcaaaggaagccttagcttcttgggtttctaagacgctaaacttgaatgcccgcattcagggaaacaagaaggaaaaatggaaggagggtgaaggggtcaaattaggtttggaaggttctacttcacatgactcaattcctcctgacccctcgtgtcttttttgggaaacaggattcacctcttgctgtgggtatatattcccacggcaatttagaaaaggctaaaaggggattcgatcttccctgacttttcagcagcatgaattaaagcgagctggaagaaatccttgtcatcttttaagttaccattagctgcttacaattagctagggccaggatctgagggacccgaagggaaagtggctggtctgggttgggctccccctgggcggtaggagtgccgggtaggtgtggacttacccctgccagttctcgcggaaaaggaggaagctgggcttcaggagcgggaggcggaggagtgctggctgaggcgccagcaggggcaggaggttctagggcatgctcgccagctgactcggggtgacccgtgccatggtggggggcctcagcctccccccgaggctcctctcccgaatccgacaagtttttttgctctgcaggggactgggagcaaaaaagacaattttccttcaatgtgaataaaggctgcatcacacagcaggaagggcgggcaggggtcagaggctggagctggctcagcttgcagcagctcctgcgcctgggaggaagatggggagagcaggcacctgcttctgggttctgctcaacaaaaccggctctccggctgacggaagggaagtgagagtggactaggtgccatgtgactttgcagggagctctacagtgtatgagaagcaggaccctcgtttccaaaactatgggctgcctggcaaggagctacttggcttacgggccttggtgatcaagggacagggacgatcatgcaaaatattaaaaccccttcaggatctcaaaaatactgaagtgggggagctggccatcagcaccatttctgtgctttaggaaagagggaggtggctggaaccccaaagttagggagaaaccagggaggccagggtcaagggcttctgcctctcgccggggtcaagggcttctgcctctcactacagttcttctagcactttccatttgttctgcttacacccaggatccagaaagtgctttcccacctcggtgagtgcaagtgtggggtgacatggacactgagagctggtttttgcatcagtggcaggcgggtagttcagatgaaggaggggggcaaatccacagagcccctcagcctaggattctcccaggtgcatcctcaacaccccaggcaagggctcatttggaaagctgccaaggtgagagcagccggttccagaagtcttcctccccacagtacaacacccagcatcctttaaggtggttcctgggactccagcagggcttccatgggctgagagctctgtggccgtaactccaagacttttcttgagaaatgggttaaacacctggtgtcctaaaacagactccagtccccaaacctccctcttggcatcgtccaacgacatggagccatttctcgcactcggtgacctacatgactacagggctgccccgtctccccgtggacgtggctgtgcttcttcttgggtgtgaagtggctgacctctttagacggggtttgggcactacttaaaaagcagtgatccgggaggaggaaaggagctacagaaagaggatgtaagagaatgtacacaaattcctaggaaagcaaaagcaatcttcactcaaaagtaatcaaggggacactgtcgcctcttcgtatccagggcagagccacggaccagccgctctctaaacctggctctctaaacctgcacagggcaccgtggttcgtccagccacccatgtctgttgctacttgatggtgagagacttaacacctcacaagagaaaaattaaacccagagctctgtgggggactgcctatctctaattagaaccacttgaattttttgtaatccctgcttttgaaatgtaaatattcaaacatcctcatggtaattcaaaatgctaaacaggaggaccaagaagtaagtcataaacatggaaaccaagacatcaaaacaggatcaaattcgtcatctttggttaagatgaatgatttgtataagtgttgagaagtattacatcacttcctctctcagatgggagaattaacaatgtcattccagcattttctactcaggtcctagcatttctcctgggcaggaatcgtaagctctaaagaactaaggtgaagcctggagtttttcaacatgtctggtaaaatcagacatcaagagtttgccagcctttgacctcatcctaaaatacacatggctggcaaaaaccacgtgcaccagggctaagctcatcacaccaacggtaagcctcaaaagcaggtctaaacaccctacgaccacattttcagtgatactgtactttctgctaaatagcatttctgtaactgccttctttttaccaaatggccattattctgctagtacaacctcaaagcctccccacttcagattaacaaatgctctggagagagagcaactgaaagaaatgtttagtctttacaaagaatggaacagcctacataaggatatttaaattctcttcacattaaaaagaaaaagaaagaactctatctccatccaaggcagttaagaaagaaaggtttcatttttgccccggaaacaatggtgcatgtaaacgcaggcgtttcgatgagacagcacgcccctccccaggaagcgcaggcatgggaagggagtaacatccctgtgctgccaatctgaccatggcttcgttttaggccctaggactacaattaaaaccacacatggctttttctatcctggaacgataggatttggcaacctcacccaaggctaagtgatgccaccggcacccacacgcaggccacggtcccaatccgtagtgtgctgaagtgcaatctgacacatcaacgggacccacagaaaaccgctgtgtggctttgccactgaacaaaaacaaaaaattcctcggctggcagcttcatgtctttcttttcaactccaaatcatgctgaatcatgattcagcaataaaacctgagcataaagagctgtctcctttgaatggcgtgagagggatggtggagacgaaggggctcttttacttgcaccccatcgggtgtggtctgagatctcgtttactgaaaggtaagtcagctggtcccacagttgatgagacttcttgatctttgaggatcaagaagttgttaaagtcactataagtgacatctgaggggcaattaggacaatttaaaacatggactatatactggaggatattactgaattaacattttcgtaggagtaacatggtggtaaggccatgcaggagaatggcctcatccctatgagacacccgtggaagaatttagggcagaaatgtcacatgggcttaacttccggtatgagaggtgagggcagcaatgctaacagagagggcaggggcaggatacccaagtgtttgcagtgtcactcttttccaaggatttgaaaattttcagaataaaatgttgaagcaaaaagggtggggcggggggaacctcctcggaaaaacaatggcagcagctctaaaagctcggtcccagctcggcttctggagagcaagacagggatgggttgatggcctccgcaagagagaatgaaaccataaaggctctcaaaccctcacttctgacacacactgcagctgctccctgcaggccctgaaccagaaagccaaggagaaacaaagccagccgcccgccctgtgtgtttactttccacctcactccccagtggcagaaaggactctagggccatgtggacactgtcctccgacagcgaagcaaacacgctcctcctgctcctggcctcagcacagaggtttcccacatgcctcttcagcgacggtgccacagaagtgcgagtgacagaagtgggcagcccaactcccaaggctggagggcagttatttttagaagtccatttagaattggctgtgagccaatattttgataagaactatacttggcattttatttttaatttttatttttaattttttttgagatggagtctcactctgtcgcccaggctggagtgcagtggtgcgatctcagctcactgtaacctccagtcccgggttcaagcgattctcctgcctcagcctcctgagtagctgggattacaggcatctgccaccacagtagagatggggt[131 bp omitted]ctagccttctggttcaactccaacatgtttatgtaattggcatagaccccttgaaggtcatacatgcaaattagcctgcaaatcacaaagcaacaaaaccccctcagctgtgaaaacagtactgacacagcagctagtgactttaaaagcactttaaattcatctgagcaaatattacacattactgttccatcttgctggttgccttaaagtcttcagatttaaagaattactgattcctattgtttgttttaaaccaggggttggcaaactgttttctgcaaagggtcagatactaaatatcttaaggctctgcaagccacacggtctctgtccaaatactactgctgtagcagccacaggcaaccgcaaaggggatagttgtggctctgttcttgttggctcatgcccacaatcccagcactttgggaggctgaggcaggagaaatgattaaagccataagttcgagaccagcttgggcaacacagcaagacaccatctctaaaaaaaatttttttttttcaaattagccaggtgtggtggtggtgcctgtagtcccagctactcagaaggctgaggcgggagattgcttgaagccaggagttcaagactgcagtgaattatgatcacgatcctgcactccagcctaggccaaagagtgaggctccgtctctcaaagataaaaacataaacaaataaaacaacagcaaaaaacaaaacaaaaaaacacaggtggcagtgctgtgccttaatttgctaacctttgttttaaactaaaaatggttcaaaagataataaaatgcaaaattctagaaaatcctgattttactgaacacctgaggaatgactataacatctccaacatagctctaacacacccaactcctgaggcttcactattctctaaaactagagaaatgcaccagtcctttcgtactgatggaacctccaaaagacaaatcataaagccacgtcattaagctgtacttgtcagggcccaagggagaggagatagcagaggcagatttatcttggaaatacctggagaaccaaaacaaaactagaagaaagttttcatgtttctggattgcttcttcagcaaaaaaagtaacaatgggaaagtttcatgagttaaagttacaagcttagtagataagtccaggctaacacacaggtatcctgggaggggtgtgctgggggaggtttagaacaaccattttcccctcctccccaacccctacaaacacacacacccgatccccacagagcacttcaacattgctcaggaaaaccgggccacatcaagataaatgctggctttgggacaggacctaagaccagcagctgagtcccagatcatgagagcggcttccagcctgggagccggtcacctgtgaggggacagaagccacaggagaatggagttgatgagattctcaaatcctgttattaccaacaagatgcagacatcctcaaaatgcaccgaattcagcacaacacttggtcactctaaaatgttgcagcgggtatgaggtggggagtgccgccgctgggcatcagtgggactgctgcagcgggtatgaggtggggagtgccgccgctgggcatcagtgggactgttgcagcgggtatgaggtggggagtgccgtcgctgggcatcagtggggagggaccacacattatttctggataaacagtgagggtccccatgcaagctgaggagtcactgccacacagcaccaactaacttctgacaaaactctgaccatccacaccgatctgtcagggagagaagccgatggcttcaaggtaaatagcacccatcgttgtcttatcacagaaccctgttgccacaccaatcagaccttccacaggctgccagctcatcgccatgaatcaggcgaggtacttccaaccacactgcgacccagacaccctgaatccaagggagaagcagcctcatggacacgggataaatatataatgcaaacaaatgaacaattactctaaatgcacgtacgcccagctcgttagggccaataaatccaggcttaaaggtcttgtttcccctgtaaccaccattgctctcctccttcccctccctccctccctccctgactccctccccaccttccctcctccctttgccccctactgtccctctgctgttggttttcctaaggtacagtggcatttctcaaacaaatcatcaggaattaggaagaagctttctaataccgtttcaacaaactgtactctctgagccctttccacaacagacccatcctaacctctctccacggtaacctaaagccaccaagccttttccctccaagctcaacgtgaaagtgtaaaggcctctgcttaggtctccccgtctgtgggcagaagtggccttggcaatgcgacctggaaaagagactctcagtaaagagagaacaaattagagtaacgaagtgaagagagaacgtaccggccccttaccttttgtcctttatccttctgaaacacaaagacgggcggagcaatggcaggcttttctgcaaaaagaaaaattagtttttttccccccaacactatatgcatacagtaaacaaagctacacttgtttgtaatatgttaaacatatatataaatgaaactagtaactccagagaacatcaaatcacttagaacagcgtcttgactcggatgcctggaggcacaggtgtgctgggtttgtgaaatgcacccagaatgatgtgacgtgtgccctctgctgtatgcatttatcatcaataaggagttttcaagactcactgagagcgggcgtgtaaatgggagtgggagagcagcggagagtgtggcagcgctatttggcgccatgaactgtgaccttgcaggaatgtggcacctcctgaattgcaaatgttagagactaatttagctttttaaagtttacaggccagagggcaaaaaaaagggccaccgctcgcgctgtttgcagacagttctggtagaagaatcctaacgctcaacctggatctctaagtgagtgctggttgggaggaaaggatgtctggagttgctagaggcctgagagtccatcttgcacagcggctgaaggaagaaacactctggggtgttctgtcacttgatgggacaagagcaaggcggcctgtaatgcccacgcaacaccatctgtctcctacccaggggcagccagatccacagccctgtgccactcagccccggagtgggtggcagcccaggaggccctgctgcccgcacaggaagcacagatgaggactgcctcgaccccacgaggaggcgcagaccacacctgcctcatggccttgggcctgcatgcactttgatgaactctgggggtgctcccagggcctctttcaccattcagggcactgagggcctagcgtggaggccaagcaagagcagctgtgactctggtgaatgcctgctgtgggctgcgggctgcgcactggtgcctccgcgttgagcagggtttgggaagagccctgccttcgcaggccccccgaccccggtcgtggggagccaggcattacccaggaagcatgtgctgcccatgatcacgacgaaggcactctgcttgggcattgacctggtctgctctggagtccaggggaggtccctgagaagagggggctgtgctggggtctcaagaagagctggaagggagagcagcagcagcttgaagtcacagcttgcggggtgatggggccaggggcaggcggtgggcatgctgacttgctggggaaatgtcataaaaggcaaggggatgcctggggttggtttaggttgaaagcaaacagtttggggaagggagtgagagtggctgtggggagaccaggtgggtagtgactgaggtggagagaaagggacagcaccaagatgaccaaacagacaccatcccactcctgcagacgcaggacagactctggtcttgaccttggggcatcagtccacagccaggcagcccactgatggtgacattccccccaccatgctccccgaagcctcggcacaccagggtctgattcaccgtgtacagccaaggcaaacactggagtgagtggcgtgcgcgagacccaggggctacaagggagcaggggaggtcagaggggtctccaaccagacttccaggtttccctaagcagacttcttgccaacacagcacacaggtgctgcttgacaaacgtgaatgaatgcacctatgccaggcaataaatgatgtcaaaggaatgctgggggactctgggacagagcagcagcgtatccacaccatgtgtgccaccaggatcctagaggtcttccggtgccacgcctgtaccccacaagcccagccctgacctctgcatttgcctccctgccagctgccaggtgacaagatgcacaggaaggagccagggtttgagccagcttggcactctccaaccccattttctttagggagctacccacccctcgtccccctgtcccccagttcagatggagccaagctcagccccagctccaggcctgacaagaagagtcccgcatgcatcgtctaacacatggcacatgaacaaggccaggcctttcgctggagatcctggggctgctgagctgctggtgaatgaccctgaggctgccagcaatcccatgtcaccgagaggggccttggaccagagccaaccagaggtagcagagtcacagagggagggggaagactaaatctggcctgtgttcggccctgagtcaagcttggcccaaagctaactctgcccccagacttttcagtgaagccaatcagtgctgatttttgcttaagccagtttgagctcgatttctgccccttgtcgctaacagactctggcctgagagaggcgcggtccagccactgcagactgaattacacacatgctgcactccagcatctgtggaagagaccttggacaggcctcaaagtgacgctaagatgctttctttctcttcacagcaagtgtcactgcctgatccactccatattgatgggtttatggtctgtctcacccattaagatataaactccataagatccgagactgctttgttcccctgggtaccccatggcctgagaacagtacttggcacactttatggattcaacaaacacttcatgaagggggagggaaggaggacattagtgaaaatgtgaggcgaagacacttggtgccaggctagtaaggaagggctagaagagagagaaccatttggatgggagaggagtgcgcgctggtgttgagaaccgtgtcggtggatctgcaggtgcacggaagggactgcagctatttgagtaactatgggaggcctgggcaggctgtggtgccaaggtgctgcccggagccttctggacacacggcagggctgaggggcatgggccaggagagggcccctctgatggagcaaccctgtcctgtgcctggacatgtgacccagctggagacagagggaggctatggaaggggacgtgagggtcaagctctgaaaggagccacccagagaacagaaagccagggtggagtccaatcagatcctccacaattgcctcccatctcttgttcctgtacccacccctgccaccattcagccctcctttccttctctgcctctactctcactcccttagatctggcctccacagagcagccagaagcactatc[131 bp omitted]aaaccctgtctctactaaaaatacaaaaaattagccgggcgtggtggcaggtgcctttagtcccagcaactcgggaggctgagcttgcagtgagccaaggttgcgccactgcactccagcctgggtgacagagcgagattccatctcaaaacaaaacaaaacaaaacaaaacaaaaactgcagtgtcggccgggcacagtggctcatgcctgtaatcccagcattttgggaggccgaggcgggaggatcacctgaggtcgggagttcgagaccagcctgatcaacatggagaaaccccttctctactaaaaatacaaaaactgagccaggcgtggtggcgcaacctgtaagcccagctactcaagaggctgaggcaggagaatcacttgaacctgggacgcagaggttgcagtgagctgagatggtgccattgcactccagcctgggcaacaagagtgaaactctgtctcaaaacaaaacaaaacaaaacaaaacaaaacaaaactgcagtgtctcccacagactagaggctgagcaccttgagacaggccacatccagccactcaccctccacctcccactgtggtggcactgaaaagcccgctgtcgctgcacgtcccacacttagggtgcacttctggacttctgcttggtttagtcccactaccaagagcgcgtggttccccttgttttccatggccagtgcttactcctgcacagacaccatctccttcaggaagctcccactgtgagaggcgtgcctgccctgctgcactccctcccgagcaggccttatatcctgccacggggcacgcggagaccacggccacagcagctgaaacagcctatcacccagcgtacaccgcatcaacaccctgcaatgagtgtttgaactaggccctctctctgtcattcatctacacaacaccagctgctacgtactcacaaatatttactaagccctcattctgtgcagggcgccacaggaagagtggagaacaggaagctgagggcagacgcttcaggagaaaacatctgactgaaagggaggggcgtgtttgcacttggtgaccaggcactgtggagccctggcactcccagaggggtgtgtggtgacagcatctacccctagatgtaagttctagaaagtggggcctcgtctgttccgtttctctctgtattctcagtgccaaacacagagcctcacacttaacaggcactcaaccggcagttagagggtgaatgaaatgtcacacgccgcaaggacaaggacccagggagccatggtcagggctctccagaggaacggaaccaagaggatacagcaataggagatgaacttggcccatctcggcccattgggacccctgctgatggcaggtctggcattcatgactgacccagccactgcactaacatgtagaaatgagctttagtcacatctgcacccaaaacacagagcgtcagttactcacgctgcatttctactcaggccaaaggttgatcaactgcaaatcagcacggctatcgcaaacagacaagacacacaagccccattccaggcaggaccgccccactgcccccgaccaccagacacacgggttgctgttcgtagccattccctatcaccaggctgattctggctataccagtgaggaagcagcgtgtgaacaccgctacctccaactcaagtttggggaatggacaggcggccagaagtagggaggcttcaacaacctgcttcaattcctagcccagcttttctttcacaggtcaagggaagatcaccactgcagatttctagagacccaccatgaagacctttaatattaaaataggagtcaaatgcagactatttgacccagaatctgtcaaccaagtggttgggttttttgtttttgtttttggtcctgtaacatgctccctgttgaaacctagtttgtaaaaaatgcagtctgtctggagattgactttacacatccgtatattaagagattagaaaaccaatacgaggcacagtggctcatgtttgtaatcccagcacttgggagggtgacgagggaggatcacttgagcccaggagttgaagacctgtctgggcaacataatgagaccctatttctacaaaaaacaaacaaatagccaggcatggtggcgcactcctgtagtcccagctacttgggaggccgaggtgggaggactgcttgagcccaggagttagaggctgcagtgagccatgatcgtgccactgcactccaggctgggtgacagagtgagaccttgtctcaaaaacagagagaaaggaaagaaactcatttgaccagacgcttctcaaagttatttgactagggagtcccccccatttccagggacatccacaatgaggcctgagaatgacgtttcaaggaccactgtggacaacactggtgtgtgaagcgggggagattctgagcccctcttccttggacacaagtcacctcaaacaatgtgtgaagtgctctggcccaccacatacttcttctctggcctcaccatggccttcaggggcactgtgcaccaagtcccacatggctgctgctgaattcagaaccctcgtcccatctagcatcctctaccctgcgaacctcctcagctcacatgcccagacagcacccagcctgagcccaacaattgtgatcctgtgatgatcacagacccaggccagggagagtcccctgctgccccctggtaccccaggaaaacagcaagggaagatggcctggccagaaactgaaaggagtgagcccctgctggcatccgggcccacggtgctggctctccctcccatcccctgctaccctcaacccacttgtgaggctccgatgcaaaatgggaccagctgggattccccaggacagggccggtgtcctggtcctggtctttgcagccccagcgatgagcacagacaggctaagaagcaagccagccccagcacaggaagcttggccatctctgctctcctttccaacttctgccagatgttgggaaccccttagacctgcttggcctgcccccccacctccacccagtcatcctcacgtggctatggctgtcagggtgctctgtcccacctagttgagcctgggaaccactctgccagctgcacagaggatgaaaagattcaatcctaatattccctcagcaattccacacatcccagcacccactgtgcactaagcactgcgtcggcctctggagacacgtccctgtctgtctagagcacccatcacaccttatctgaacatatgacacaggggaggcacagcaggccctgggaacatagagctggggcttccaacccagtgaggctgtgaagggagtgaatcagggaatgctgctgggagaggggctgtctggacagaaggacaagcagcatttggccacatgaccgggaagcacacggcagcagagtgaggagtgctggaggaaccaggtcagggtggcacatgcagtgggcctagtactgtgctaatgcttgggacacgccttggggacagactggaaaacagggcagcctgggggaagaggagctaagtggaggtggtagggtgggggggggggtggcacggtggggggtcacctccgcccttccctggggtctgaggtctgcacatttatacctgcatgtgtcagtgtagaagctcctaggaaggaaactccaatcaaattgaagcagttcctatgacagcttttttgaggaaagagccaaagatctctgcgatgaaggtggggatcctggtggaagggggtctcttcccctggtgggatacaggcttcctcctgaccctagaggaactgttctccttgcagggggcagtaggtctctgaggaggtggggggcttgaggaggtgggcccttcctctaaagcagaaatgaccaatctgggacccaggtggcttgggggtgtgtgtgcgaagtccataaaaccctcaccctgaaccctgatgaagtcacctctgtaatttggtggacagcatctttatctagggaaagggcccagatactgcctcttcaaagagtaaggagggtgaaaggaggagggcggtttcaacagcccacatgtgagagttaaatagcaggcttcctggtagcacctctacaagcagcctccagggaccaggactcaaaaaggttttatctgtattttttctgccaagagactgactggtggcaaaactttgatgacaaaatgaattctgtgtctatttcagaggcagcaaggaggggagagggtgctgtagagccccttgggacagggtgggtggtgggggcttcccagacttaaggaaaggagtgaggtctctgcagcctactgcaagcaaggaaaggagaaagcaaggagctgggctgaaccccagcggtggcccaggggagaaaggtgagtttcccaacgctccaggtgaagaagggttgtagaatcctgttttacctcttagacttatcttagtttctgccatgatatgcacagcaaaggcatccacaaatggggtctcccagacgcgtgatggtttcatatacgtggccagcgttcttcgagcacttctttatgtgttaggttttatctgcatcatgtcacctaatctccacaaccaccttaggaggtggcttacaccaacatcctttcacaggaaaggaaacggataatcaggtcaagcgacctgtcggaggtgggcccgggtcttcgggccaggtgggccgactctgaagccccggcccatgctcctgagtgccacgctccactccgctgctggccaagaactacgtgtgcaaaagggaggagttacctggactccagtttgcttcctctcaccttttctgtgcaggtaggcctcagagctacaacacatacactcttccctttagagaaatgacagcaggaataaagtagctgtcagttgctgttctggataagcacctatggaggagcacgaaccaaactagggggctagtcatgagttccggggtcagtgaaaggcttcccacaggtcacatgaccacctgcctcagccaacacagtgtgtgattatcccaatggctgatccccgacaagactgcaatcctttaaggttgtcaagacaaggatcaaagacacattccaaggcacacactcaatggtgacacaagctgctttctgtcttcatctgtcaaatgttcggccctggaatgctttgcgtaatatattcagaatctaagctgacaacacacacactctcgcctccgcctctctcctcttccgtataaactttctttcctcactgctgcagagaataatttacaaagaagcaagggcagccctgccttacagtaagctttgcttccccaccagcccatggctgtctccagcctgtcatggaggatctcccgctaaaactaaatagaagaaactacgtaggcctgggaaaacacatataagagagaatctggaatatctttgctttttctgtttattcgcctcctgactgatgactccaatacctgccaagaaaatgccctcatctagaaagcaattgagaactcctgaccaaactgtcagcaaggtacttgcataaaattagctttaatcctgggctgatatgtcttaatcttcttacctgtgaaaaaaatatggaaagcatctcgccaacacaaataacagtctattaaaatgtggcaactcctgtaatctggtgacacgatcacaacccttcaagtcatttattttttcagaaattattataaacagttctgtgccacagcacaaaggtaaatctgtcactgacgtgtcaggtctgtcctccaactgattctttggtacggaatggaactgatctcaaacatgcagttgctaggtgatgcctctgcggatctccgtgtatagcatgctcgggttctccagcccagctagtggaaggcggtgggaccctggatgactccgttcttttctcaatactcgaatatatttctataactttcaactggtctcatggagattatggggacacactttttggagctgatgatatcctacattttatgtacttctttctggaatgctcatcatcttggcattaccttcaactaccgaactccaagccaacttccaaccactctcatctcaccaccagatacttacacttccaacaagcattgcaggggcaacaggcatttgttaaaaggcctttactggactccgaggtaggtactttacatatctagtctcattcatcatagacgcatccccatgacatcctcctcatatcccactccaccccatgagggccaagccacattctgccttctttatttctacctttatcagccctgcagccaaacccttctaagcttccactcctgcgccacccagaccgtaagccccggggggcagaacttgcacttctgaacagaaaccccataaagttatacaaagtcagcaactctgcctacaactgtatggatggctgggttcagtggctcatgcctgtaatcccagcacgttgggaggccgaggcatgtggatcacttgaggaaaggagtttgagaccagcctgggcaacatggtgaaatcgtgtctctacccaaaatacaaaaattagctgggcctggtgggatatgtaatcccagctactcgggaggctgagacccaagcatcacttgaacccaggaggtggaggttgcagtgagctgagatagcaccactgcactccagcctgggcgacagagtgagactctgtctccaaaaaaaaagaaaagaaagaaaaaagaaaaaactgcgtggagagatggaggatccagctttaacggcacttttctgttccgccactaggtggtgtgacaccaacacagctgaggcaacatgcaagtggctgaagactcgggaaagttccagtagagacaacaggaatcccctcctctctacacggaagcttacaggaaggaaatccaagaactacagaatttatgctgaggcagcagagcaaaactgatgatactggagagcgcgggctctggtctttgtgtgtgttcaaacctgccctggccacttacttgcggttgggatcccagataagacaatgtacctctggcacaatgtcttcatttgcatatcagggctgttatttcaccccaggcagcttcggcaaggatgaaatgaaatgctgcacatgccgtgtttggggaagtggttggcacacaggatgattccacactggcactggtagcattattatgctcggaagattgcaaacatattgatgccaccttaaagcataggccttggattcaaggacagctgccagtgcccggcaacgacaaatgcgtcagagtctgaccccttttagggggtggaatggttggatccaagagctgcctggacgcctgggacactcaaggcaaacgctcaggtgctcggaatgcctgagcccttctgaggtcacaggaaacaggtgggatctgaaggcaggccgagccgagcagccaagccttgctctcaccagcaggatctaccaagcacagacttgtgctaggcaccgagcttgccactggagacaggaaagaaatggcagacaaggccgcagctctctactgggaaagagaaaacaaacaagtacctgctgtgtgcagagataactgggtagttctggagctgggtgctgcagagaaaataccacaggatggtgggagagagtgagtgaatgggtaaggcctcgctgaagctcacacatgaagggtgagcagggatgagccaggtgaaggcaggggatcccaggcagaggggaccccaagtcaaaggttctaaggaaaggaagagcctggaggcccatgtttggaggggaggagaacgggaagggctgggtggagcccacaggacgttcagccttgcaggccatgctgacaaatctggatttatccagtgtaaaggttggggcccaggctctggactcttaggacccagtggccatcaccatcaatgctgcaaaacatcctctctcctctgagcagagggtaactgcctgttttctcaccctctcccccagagaaaggcaagttctcaaggaccgtttccactcacgctctgctctcacagatgcaacgcaggaattaattctgggtaaataagttcccaaaattctctgtggcaaacctgggggagtttaatttagcaaaggcattttaaacttactgcaaaaggcaaggcctgccttctaaacatgtgtatggagtaactactactgtctctagaatttcctccctttctttgaacaccataaacagcgacagcgaaatgcagtgccctacgcgggtcagttttcaggggtgaacgagtgcccattacctagagtttactgactcaccgggaaggacaagcatgaactcctagactccatggctggagacaggcgcactggccctagccagccctacctgcttccatggcctcgggcttcagcccctgtgaaatggtgcagccaggactcaggcatccctgaaggttcttcccagcccttacattctgtcaggtcctcaccctggaccagaggcagtgttaaaggtcaaggaaaagactgttcttcctgaagagggatatgatgtccattgaggcctactcagctgccaaaaggccagaatagaaaaataaggttgggaggaagggccttaaactctagctggcaattaatttattcctgggtaggttcctttgatcctatgaccagtggttctcacccaggagtaacttcatctccctggagacactggtcaaaatctggagacattgtgactgtcatgtttgtgggggtgtggaggaaactgttacagacatctagtggatggagaccagggatgctgaccaacatcctaggaggctcagaacagtgccctaccagcaagtgacccaagtccaaatgtcaactgagctgagggcaagaaaccttgcattaatcttgggcaaaaaaattgagctggatctctaactcacattatacaccaaaataaatccccaatagattagatggcacaaaccagggtgaccccccaccctggcttctgggattcaccgcctctctccctccccactcagactgtggctttaaatgtgtacaggctcctacgacctcagtaggttagataactatggaacacaaagtctcttgggtgtcaatgaaatcccataacccaatggttctcaagtgggggcaattctgacattaaggggacactggacagtgtctggagaccttttatcttctcatgactgggagtggatgggtgggatgactgggtgctatggcatcacatgagtagaggctagaggggctacccaacatcctccaaagcacaagatggccaccaccagccccaatgtcaagaatactgaggtggaaaaaccctggtataactcacagggtgctttctctctactcaggcatccaattaggagaatcacagctagaagtaactgacatgtatctccacattccagtaggtcaattaccagaagtatattctctctcacaccacaatcctcagacttgcgtatcatcgttcccattttacagatgcaagagctaaggtcagacaacttgcccatgtttctagggcagaaggcaagacacaaaccaaggacagccaatccaggtgcttccaaccatgccacaagttgccaatgggaacctgctggtcagctctggtttagaattctcccgatgttggcaaggcagcggagaaacccacactgtacactgaggctctgctagcacatgccagtggttctcaaatttcctggtctcgggacccttttccacgcttgtcaatgactgaacatccccaagagcttttggaaatgtgggatgtagctactactgacaccatattagaaatgaaacctaagacaatttcaaaatacttaagattataataaactccagaaaggtttagttaaataacatatttttatgaaaaataagtatttaaaaaaatctgagaagagtggcattattttacattttgacaaatgtctttaacgtctgacttaatagaagatagctgaattctctctcttttttttttattaaagagaggggctttgttgcccaggctggctttgaactcctgggctcaagagatcctcccacctcagcctcccaagtagctgggactgcaggtgtttgccactgtgcccggcctgaattctcttatctgcttctatagttcatctgttggcatatcacacatccaataacctctggaaaaaaactccactgtccattttcaagtgaataagagtgaaaaaagagcagatagtgtctttgtgttgttatgaaatagttttgaacttgcagtccccttgaaaaggtcttggggactgcagggccccggaccatctttgagaactgctgccatatgctatctgagttctagcattccaaggacactaaatcctaaattacagaccatgaggtgctttatgctaaggttctagctaaagagcactctaagtgtagagaatgcagagtctaggagtctgtataataggattgaaacccaaataccaaccaaggtcacaggcactggaagagaaggaagtgggctaggccccaagtaacatggcggagaccacaatatccaatctaatctatccacaggcgcagctgttccttagcactgaaaaatcactgctgtgcaagaatgcaggccaagggtggttgctgttttctgagagaaatcagaaatacaatttttttcccctctgaaatctcagaattttaagtgttggctcctaattacaaacaaaaacctaaatgggccaaattaaatatgtctgcttgcccttcaggcaagtttgcaacttctgcctgtggttttcaactctggcttcatgttgttaaacatctgtggagctctttaaaaccacagacaccctagaactcctggaaccatctccaatggtgcagcccaggcagcagttttgattttccctgacaacctccttaaacaagtgtgaagcccatccagggctgagatccatagctagtgctgtgtggcagctctaagtgccaagactactgaggaggaagcaaactgtggacatgtggaaggtggtggtgaggagctttaccctgatgtcccaggccacgttattctctactgcgtagggcagagtcaaacagaacaccgctccaccaggaccccctaaaacaaagaaaacatcaccaccagaccctgaatagataatgatgcaagcccaactgcctcacgattgcttcaaagtaccatggagagctaccaaatgcccagccaagccaataccagccatctcggcagttttgtggtcctctggtaagttttgaggaacggcgctctcttctcagattccccaaatgcatctcaactttccccaaatggccttcgtctcccactacacccaggcctattcactgtctgaactcacgtaggagggcagaattcaaccccccttctccaccccaagctcctccaaatgccactcgaagctcaccccattcctgctgcttctgctcactctgaccacctcagaggaggagcacacaccagacccaggttgaccctaacacctaatgaatgcacgagggtgccgggaaaatcccattttctggtaaacggagaggcaggctgaaggcttgtttgaaacattttgcagaagcccagtgagggcttttctgtctatacgcaggatcctgggcaaaatggaaagtctcttcaaagagtataaagattttgcagcctggataccccttgggtaccatcaggccccttctgctacagatacaggaggcacagtggaggtgaaagcacacattctgctctaagcaaaaatcccagaattagtttttataataaattcacgagaaactttccaaaagttgtttaagataggttccaactatttcagttctagctaaccaataaaaattcagttgcatctcaccctctcaggggctaggttttaagtcaacaaggtgcaagctgagagaagccaaaccaccctcaaaaatctctcgactcatacctggtcaggcttttaaatcagtagttctcaactgaaagcaactctgcccccggggggacactgggacggagacatttccactgtcatgactggcggggatgaggagggggatgtgctattagcatttagtggggtagaggccagggatcctcattaagatcctacagtgcacagcgcaatcgcccacaacagagaattacctggccccagatgtctgtagtgctcaggctgggatccctgagatcactaagtgacaggcaggacagaacttaggaggacccagagcccaggccctgctggtcttctgccaggggctcagcccagggccaactctgagtggggcaggttcacccacacaatggagactttgctgaacccttcagctgaatgtgtccagagcagagtgcactgtagtaaaaacagtgacctgagtgtttattactatgagcagagactggtgctaaacaatgtatgtgcactcattccttcaatgctcacagcaaccacgaggtgggtgtggttaccattattcccattttattggtgtggaaacggggggctcaaagaggttaagaaatttgccccaaatgactcagagtggacagcggagttaaaacacaaacccagctctctgaggaccaaagcctgtgtccccaccatcgataccagtgagtctctcacctgggggcgattctgcagcctccccacccccactccccaggggctgtgtcaggagacttcttctgttgtcatgacgaccccgcgagtgaggggaggtgtgtgctactggcatctagtgagtaggtccaaggatgctaccgtgctgctaaggatcctgcaacgcacaggacagcccctcccgccaaagagagccatcaaaacgtcaactgcaccacacaaaggtgagagccctgcttcacactgtctcccgggtttccaccacgcatgtccacaggccaacagggcctttcatgtcaggatctagaatccaagattccctggagttcaaatgtgctttgctcaccctctttccagtcttctttacctttgccagggacaaaactctgccttcaaatcctgatgtcagcctacaatgcagcataaccctagagacaggatgagtaatgagtctgggaggtatcaatggggaaatgccaagcaggggagacttatccctggatgcaagggtgaaacatgcacacacactgtctgagaggaaaagcactcaggtggactttaaaagtcccagaccacaggaagggctgtgagagttgctgtcaccatccatgaggcgttcaccatggtgacgagggccaacaagatgctttacacaacagaaaacatttcctcgtatacaagcagaggacacctaccctctactactcaaaccagcgggtctcaaccctgcctgcacatgagaatcacctgtgctgccacctgtacagaggcccagaacccacccaacaccagagagaatcggaatctgcagggcgtggcgactgagcatctgcggtttcaggaaagttccccagggggtactgatgcccagccgggtggacagccgctgctcagcctgacacagaggtgggactggcccagagaagagagatggcaaatggatggaggagggactgggtgtgagggtggagcaacttatgatctcagtctggaaaggcagaagccaagagggcatttgactagagcttaaacagcaagaacaaacacgtgaccatggggcagcccctaaagcttcaaaaggcacaggcaaggaggccccactttacacagtgaataacaaattaaacatcctggcaggctgtacaagccaaaaccagaaatggagtgttcaagaaacacacaatgactgattgaaggacggcagggatatatgaggcacaaagtccaccaagatttgatttcctgaggacagttatcccagaactagcgtcagggacaacgtgctaggtgagtgtggcacttactagggaaaaaaagtgaagttcaaaacattccatttctctctttggcccttaccagttcaactatcccatttacaaccaatagctcatgtggacagcatatgctagaaacagtatcccctggaaaagggcaagccataatttcccctttgtgctcaaatgtattcctcacaacagggtcctcactggtgaattcattcattcatgcattcattcattcaaccaatatttcctgtgtacctactctgtgccaggcaccgttctagatgcaagggggcaatcagtgatcataacataaaaatccctgacctcatggagcttacatggggcaaacatgcatgtaatatctagcatgccggattgttaagagctatacaggaaaatcaagcagggtgaacggaatagagaacatggatttaatttgaaataggtggccagagaagctctcattaataaagtaacatatatgagtaaaaaccagaagaagtgagccatgggggtatctgggggaaaactgtttcagttagaggaatcagcaggagaaaaggctaaaagcggggagtgtatgcaacattcaaggaaaactgaaaaagccagagtagttagcacagagcaaggcagcagagagtggcgagagagaaggacagggacatattggggcccactatgggctgagaagttctcagatgggtaagggtggagggaacgggggctaagcattgacggtgttggtggggagaagtggtggtccccctttgggaataattttaaggtagaaatgatagtatttgctgtgcagtatgagaaagagggaaaccaggggtgacttcaaggtttggggccagaagaattcaaagaatggacctgcctaactaactacaatgggtgaaagaccatgggatgggcaggtgtagtgggggagataaggattttgttttggaaacgctctagacttacctatgacacatccaaatggagatgtcgaaatgtgatgctggacatgagtcctgagttcaagaagctatgtgggctcaggatgtaaatacataaaatatgtcatactgattcccacttacccagtccctctgtaactagatctcatgagttggaatgc[151 bp omitted]cccgtctgtactaaaaacacaaaaattagctgggtgtggtggtgcgcgcctgtaatcccagctactcgggaggctgaggcaggagaatcacctgaacccgggaggcggagattgcagtgagccgagatggcgccactgcactccagcctggctacagagctagactccgtcccaaaaaataaaatagaataaaatggccaagaatcagggagagaacctgtgctgctgcctgtacagatgcccagcgcccgcccaacaccacacagaatcagaatctgcagggactgagcacccgtggtctggcatctgaagccaggccatcttggttcacatccctgctccttcccagctgtgtgacacgccttggataagcgacttaaccacgttgactcagtctcctcatcaagtgaatggggctaacagtatctatacctcctaccagggaaaacagtatgtcaagactttgcaccacacctggtaactaccctaaatgctccacaagaccaagcacttcctatcatcattcattcattactgcaattcggtagggaaaaccctccagtcacagggagcaccgaatgggggaatcagagccagacaggtagagagcttgcctgcatttgtgcaactagaaaagggggggagctaaaaataggcctcagaagtcttgaagctacagcgatggcaacacgactatggatggaagcagacatcagccttatggtgccttctcgggggatctggaagtgtaaccttgtcaaaaacactcaggtgggctgtcagcgctccacagaggagggactcgcacggtctcttgtctggaagtgcagcaaaaagggccaaagagcagccagggttttcggcggcccagatcctgcggcggggcctaaatgagggggagacgaagcgccccgaaggatccggggggaactggcgggaagtgggggccgaagttcggggcggggacggggtgaaaacggcctgggcttcctccgtccgcggtgtgcggctggcccgcggaggacgagggcctcacgggcttaggagataggcagccaggccggggaaggggagatgccgggtggcggaggacgagggggcggggagggagcgtggcgcgctccgggccacaaccaggccctaaggtctatttacatccgtggccgaagcactggggccgcgcctcccgcccccttcagccccgagcttggctgcgacgcagaggggccttagggctgcgatcccgatggccacccggctcctctagccagacggctgcagtggctggggttgccgggagtgatgggccgggccggtgagcccggcctgaggggacgcaatagggggcggctgcaaggcccgccacggcgctagcctggagcggacgaaacccttgcactctgcggtgctccccccaagggcttgtggcccctagtcctcccgccgcccgttccccggccgccagccggtccccaacggcgcctcccctaccttcgttcgccaggtccgccattttacttccttaagccctcccacaaggccccgcgccggcccaggctcgcctgctttctgccagaaactcccgcgcgtgcgcacttaacaagccgactccgtgtgaggcggccagctcgcgcctgcgcgctgaatgccgcgcggaggcgagccccggatcgcctgccctgcagagcagcctgccctgacgagccgcgctcctagcacgcacctgcgcacgagccatctcccgcctccttttcccgccgactgagagggcggggaaagggccgggaagggcgcatgcgcagtggcagcgactaaggtttagtgaggcggcaccgcgcggcccgaggcgggtcttgaagcactcgttttcccactcgttttccggggttcccccgcggtgggacagtgagcagttcagggcgccgcagccgaggccttcctccaggtaaatcgccgggcctgcgggggcttcccacacgcgcgggcgggagacgcgttgcctcctacctcagtttacccgccttaggagccggtaccttcggcaaacgctttcctgaaaccacgggggaagtggcgagagggcgcggggtgcttgggattggggggtaaatcagagctcatcggcgggggcgggggtcgtggtcaggctctaggagggggcgcagccctgggacccaggtgctggcgttgggggcggggggagccggcgcgagggactcgacccctcggagctacgagaatcaacttcacaagctcatgggaggggaaccgcgcgcctccaggttacccatctgtaaaatgggaccatcagcctcactcacaaggctcatgggagggtcctggacaccctggagttgttctctactcacctgctatgaatctctcagcaaatccttcggacttggccttgcctccaaaatacagcccagagccacccattgtcacccccaggctgtcaccaccctaggccacatcgtccgtatctatctcatggaagacttggacagcggcctctctgctatcctttgctgcattcttttgaagccccaggcttggttctgcacatggccgcaggctgaggagtctttgaaaaatataatcagccagacgcggtagctcacccctggaatcccagcactgcgggaggccaaggtgggaggatcgcttgagctcagttcaaaaccagcctaggcaacagagcaagaccccatctctacaaaaacacaaaaattacccggatgtggtggtgcaagcctgtggtcccagctacttgggaggctgaggcaggaggatcacttgagcccaggaggttgaggctgcagtgagctgtgacagtgccactgccaccatcctagggacacagcaagaacctcccccatatatatacacatatatactttgtttttatctatatatatacacacagatatatacatacacgtgtgcatatatatgtgtgtgtgtgtatatatatatatatacacatagactgaaaatggaaatatcaaggccactcagtgcttccagagggctctcagctgaacttggaatatcctaaaccttgtattcaggtttatgaagtcccctgaacttggctcccatgccctgctttgttcccccttgctcattgctgttcagccgcgtgggtctttccatccttggagcacaagctcattccaacctaagggtctttgcacttggtcgtctctctgcctgggaccttgtgtttcaggtcttacctaggttggagtcccagctctgcacctttttgagtatgatctaaaagagagcgaggagtactacaatctgtgggccagatatagtctatgagctaaaaatggttcctccctccctccccttgttccctccctccctttccttcccttccctttcttttatttattttggaatctaactctgttgcccacgctggagtgcagtggtacaatttcgactcactacaacctccgcctcccgggttgaagtgattctcctgcctcagccttctgagtagctggcattacagctgtgtactactatacccagctagtttttgtgtttttttgtggagacagggtttcaccatgttggccaggctgctctcgaacttctgacctcaggtgctctgcccaccttggcttcccaaagtgctgggattacaggcatgagccaccgcgcctgccgatttttttacatttttagctggttgggaaaaaaaataccaaaagaagaatatctattgatgtgaaaatggtgtgaaatttacatttcagtgtctgtaaataaagttttatttgaaaacagccaatgcttactcatttatatattgtctctggctacttttgagctgtgacattagagctaatttttttttttaacagaaactttttggccaacaaaacttaaagcatttactgtttgtgtctttacagaaaaagtttgccagttcctaatccaggacacatgtatttacatggttgttaaacttttctgaacagccagtgggatgtggtaaatatttaacagcagcttctctggaagagaatgtattcgttagtatgtatttatgtgtgtgtatatagtttattgtaaattttacttatttttctatcactttcttaagaccacaagacaattaataaaacaaattgaaccctgttttgtagcgtctgctgattttctgggtgtgaatccttcagccatggcctatattgttactaatgggatgtcactagcaccagagttgggaggacatgcgcagtagtagcacaccagattcttttttttttttttttttttcttttgaggcagagtctcgctttgttgcccaggctggagtgcagtggcgcgatctcagctcactgcaacctctgcctcccgggttcaagcgattctcctgccttagcgtccccagtagctgggattacaggcgctcaccaccatgcctggctaatctttgtattttcagtagagactgggtttcaccatgttggccaggctggtttcgaactcctgacctcaagtgatccacccacctcgacctcccaaagtgttgggattacaggtgtgagccactg[133 bp omitted]ccagcacagtgaagccccgtctctactaaaaatacaaaaaattagccgggtgtggtggcaggcgcctgcaatccagctactcgggaggctgaggcaggagaatcactcgaacccgagaggtggaggtttcagcgagctgagatcgcaccactgcactccagcctgggcaacagatgagactctgtctcaacaacaacaacaacaacaaaaacctgctactttctcagtgtgtccccacaccagcagcatcagcatgacctggaagcttattagaaatacacaatctgggctgggtgcggtagctcacgcctgtaatcccaggactttgggaggccaaggcgggtgaatacttgaggtcaggagttcaagaccagcctgaccaacatggtgaaaccccgtctgtactaaaaaaataagaaattagccaggtgtggtggtacacgtctgtaatcccagctacttgggagactgaggcaggagaattgcttgaacccaggaggcggaggttgcagtgagccaagatcacaccattgcactccagcctgggcgacagagtgagactgtctcaaaaaaaaaaaaaaaaaaaatacacaatatggccaggcgtggtggcttacacctgtaatcccatcactttgggaggctgaagtgggcagattgcttgagcccaggagttcaagaccagtctgggcaacatggtgagatcctgtctctgcaaaaaattagctagttgtggtggtgttcacgtgtagtccccagctactcaggaggatgaagtgggaggatggcttgagcccaggcgttgcaggctgcagtgaggtaggatggcacgactgcactccaggctgggctacggattgtgaccttgtctctaaagaaaacggttaatttgaaacttcacacctgtaatcccagcacttcgggaggctgaggcaggcagatcacatgagcccaggagttcaagaccagcctgagtgggcaacatggcaaaaccctgtctctgccaaaaatagaaaaaattagccaggcgtggtggcacacacctgtagtcccagctactcaggaggctgaggtgggaggattgcttgagtgcgggagacggtggctggagtgagctgagatcacgccgctgcattccagcctgggcaacagagtgagactgcgtctcgaaaaaaaccaaagaaagaaattctctaagagtagctcgaatgtcagtccccctggtcacccacagtgtgtagaattcaggtcatctgtcattcctggggtgttggtttcattattttcaggtttccccaaacttctcttgggtaggtcttctcagcctttaccatatctgcacggtgtgacct[138 bp omitted]gcctcagcctcccaagtagctgggactacaggcgcccgccactacgccc[168 bp omitted]aaacagatacttcgtatcaccgtttaaaatggaaaaccactaagccatgagtagaccattgtaaaagcaaacatgaaaatgaaacaatgttttcacattcaaagtagatactgtcgcctgccaaggtgttgggcctgctttttctttgatacaaagggagattagcaaagtattagagcgttattgaagaggcttcagcacttggcggaaacttccttcctgatgtgatgagaaggagtgaaagagaattgaaaacgggctaacataatctatgttattcattgtcgtttaacgccatgtctacatgtcgcctaaagtcatgtcacacaccacattcatcccacactttgggaaactcgcagcaccatgtcatcacttgctaaatagaatccagtcgtggcttttcaggggacactgagacacgcaaaacctgtcaggctgatgagccaaggacgtttccagtggtttcgcaagcctcctccaagtgttgatggctgccagctttcctcatctggcctctcgtagcaaattaacttagtcaacattcacttacacaaatatttgtcagttgcctactgtggtagctttaaaatatggccccaaattcgttgacccttttcccagcaagagaggagggtgcagctcccttcccttgaatgtaggtgggcttgctgatcaatagagcacacaggaaatgacaccgtgtaactgacgacgctaggacataacggacagagatgcagcttctgcagcattgctggaacagtctctctgaaagcttttggccaccatgtgagcagtccaactgccctgcggctgccatgctgtaaggaagctgaaacacagatctcatggcaaggccctggccaagagatgcccagccaaaccccaacagctcctgcggcagccgctgactgtaattgcatgagagaccctgagccccgtcagaaccacccagcctagcccttcccattcctcacccacagaaactacgaaagataaagaattgccattatcagccactaagctttagggatgttcattacacagtagtatgtatccaccacacctatgaggcatcaggcacatgttggattcccgggatgaactagacaggccctgacttcacggagatttgcagccttttgtggggagactaacagtagacaggtaagcaaaataatttgagatagtgatgggtgctacaaagaaaataaaacagcatgctatgacacagtgacagaaagagggaatactttttgtttgcttgtttgttttgagatggagtctcactgtgtctcccaagctggagtgcagtggcaggatctcggctcgctgcaacctctgcctcccgggttcaagcgattctcctgcctcag[221 bp omitted]gagccgagtgaccaaaaagagaggtggtggagatgagctcagggagggagcgtgcagggccttggaggctgcagtgaggagttagggttttctcctaattgcaggggttggaggcaggaaatgggagggcttcaaatgacttgcccttaactgctgattggcctctgtgctgtcagcttcctccttggctcaccaggatacaggtctctgaggagcctctgaacccaggctgagctctgaagacttatgtccctctctcctctgcagccaaagaggacgatggcttctgcagctgggcttcaggaaaaggggtcttcacagctgcaattaagttttcatcttcccatcatgggcagggagccagcatgtgtttttatggagcaaaaggagctttgctgtctgacgcgctaggagccaatgctaggacatgggtttgtgagaaaagctttttattgcaagttgactaacaagcagatgggagtccaactcaaagctgtctccccgtgctagctttaagaccatactttttgcgtgtgtggagatggggtctggctatgttgcccaggctggtctcaaactcttggcatcgagcaatcctcttccctctgcctcccaaagggctgggattgtaggcctgagacaccacgcccaccctaaggcagtcaatacctttattagaagaggtgtagggggtagactgtggcattagtaggtaggtgactggtagaaaggaataggaagtctggaaagtcctctggcatgcgcagttatctcttcatccctcatggagcgcatgtgcaagttcggggggcattagtctaaaccatgcggtagaaattgaggctatgacatcagcaagctcgttctgtgcaaactccagtccgccatattgttccaactgacttcagccagttttgttatcttacaagcagagggagtttcagtaagttgtttcttttcttatccagcaaactcaggaatttctattagtcataggtttctttaactcctggggcagtgcttcagtgcctgctctgtgcccagcccacactgaggttgagtacccagagatcaatcaagtataattcctgcccttaaggagcttggagccaggtggggttggagggacttcatcatgaatgcgttattagttcatctgccttccccgttctccctcaacccacggcctcaagttcctgacaacaggatgtcggatgtgaccaatggtggccccttgcccatgatggcaggaacccctgacccaaactaggcacatcagccagggatttgggactggaattgcttctctctggaagaaagctgggctggatcctgttaacatggggtagggccacattctccttcacatgacctgatctgcaaccaggtcagccgtgctgagaggtggagagcccagagtgccacagccgggttcccaagccttcactttgctcggtgacacattcctatctcctgatcaactctgctttttctcctcctcctcctcctcctcctcctccttcttttgttgagatggagtctccctctgtcacccaggctggagtgcagtggcataatctctgctcactgcaacctccacctcccgggttcaagcaattctcctgcctcagtatcccgagtagctgggattacaggtgcccgccaccacgcccggctaatttttgtatttttagtagagactgggtttcactatgttggtcacgctggtcttgaactcctgacctaaagtgatctgcccaccttggccaggctggtctcgaactcctgacctcaagtgatctgcccgcccaaagtgctgggattacaggcatgagtcgcggcacccagcctctttattttaaattaaataaattaaattttacaataaatacatttgaaataaattcagacttaaaaaaagttgcaaaaatagtacaaagagttccatatagcctccatcagcttcctcagatattcacatcctgatcaaaatcaggacattcgcactgatacagtactattcactaatgtgcaagccttattcacatttcctctgttcagctctagtgtcccttttctgttccaggatttagtcctggatcctgtcttgcatgtaggtatttctccttagtttcctttagtctggatcatttcctccattttttatataccttttcttgacaacgacatttctaacgagtactgcccaatcatttggtagaatgccccttaactttgggtttgtttgatgtttcctcacagtgaaactcaggttaagtgtttttggcagggattacgcagaagcgatgt[136 bp omitted]cctctgcctaccaggttcaagcgattctcatgcatcagcctcctgagtagctgggactacaggtgcgcaccaccacgccaggccaatttttgtattattagtagagatggagtttcaccatgttggccaggctggtcttgaacttgtgacctcaagtgatctgcctgccttggcctcccaaagtgttgagattacagacgtgagccaccgcgcccgtccaatcgcttgctttaaatggtatctgccaggtgactttttcccattgttatgttggggggatattttgggcctttgtaaacaaataggaaatattcgaggaagagaaggggaggaggagaagggaaggaaggaaattagctcactcactcacttgtttttgatctttcttatcatgcatcgttgcaaataagtaaacaaatcagccaggcttctgggcaaaatccaactttgtgtcccctgtgaaaaggaaaacgctgtgtcacagagtgaccactggggggcagcagagacttgagaggaatcaaaacaactccaggaaaaagggcagttggctaccttctgggaaactaaacttaccggtaagctccgcatctgctggggttctggtgtcttccatgagccaggtcgtggaagtggaggtagggagtcttagttgcacctcgctcccagcctgctgctgctgttgccaagccgtatggatgccccaccttgaaaactggggctgtcacctcgggagggcttcacgaggtctgagaatccccttctgagactggctagaaaattcctgggtgctgagggtgtacctgtttggagactgattgcaaccccccgaaagcagttctggaagatgtaagccaagggggaatttactggaaggttatgaggatattcatgagatcaaaaagaaaggagaagcaaccagcagtttcaacaggtcttagaagcaaaaatcactgaggacaatgcgccgggtgtctcccccaggatgcctgatctttgactgctttcagtctcacccttcaacgcagggttcagagtctaaggagaaagtgttggatggggtcagcagggtacggtacgttaatttgtgctcacccccaatcaaattcattcctccataaatattttctttcttttttttttttgagacggaatctcactctgttgcccaggctggagtgcagtggtacgatcttggctcactgcaacctctgcctcccggattcaagcgattctactgcctcagcctcctaaggagctgggatttataggcaccgccaccatgtccaactaatttttgtatttttagtagagaagggggtttcaccatgttggccaggctagacttgaactcctgacctcaggtgatctgcctgccttggcctcccaaagtgctgggatgacaggcttgaggcaccgtgcctggcccttccatcaaatatttattgagcaacaaatacatattgggctctgtgtgcccagccagtggtatgagatgccatttgagacatccaagtggaggcagccagtggaatcccagctcctccccgggacctaggaagcccccatcccatgactctgcagccttcctcaacctcctgccctgccattcactctgtgcccatgacaccagcctcctcactgctccccccacccccaacacactgagctcatttgctcccttcccacctggaaccgcctcactcaatatgtgagagccacccacacagagacagtatttaaagccacaaaaggacggtcactcttccaagagaatcagggtgttattccaaaagaaggcaggatggatgctggacagcaaaaccccacaaaatgtccatgacaggattccaggaggggcccatgatctcacaataagctgagaacaactctcagccctcctgagagcctctgtgtgagtgcacgtatactcatgcatatatgatactgtggctttggagacctatgcatatgcattttacattgcagcccaataccataaatgcatgtgtatatgtgcactcacacatacactgaaatgaaaattttgcaaagctatatttatccttattacaccatcactcctgatgttttagttagatttttatcctggttcattagaaaaagaaagagaaaaaaaaagccaagcgcaatggctcatgcctgtaatcccagcactttgggaggctgaggtgagcggatcacctgaagtcaggagtttgagaccagtctggccaacatggtaacatcctatctctattaaaaatacaaaaattagccaggcacggtgacacactcctgtaatcccagctactcaggaggctgagggggagaatcgattaaacccaggaggtggaggttgcagtgagctgagattgtgccactgcactccagcctgggcaacagcaagactctgtctcaaacaaagcaaagcaaaacaaaacaaaacaccaaaccacacacacaaaaaacaaaccaaatcgggtataactcaccaatttgatctccacagggctcctgtgtgcccctgctccaccccacagccacaactctccccctcacttgtacgattttaacaagcacctaattgacccccctgcttctgtttcttcctgtgaatccaccctgcccgaatacatctttctaaagcccagctttgattacatcaaaaacctctggtggcctcctgcctgaattccagtttctttggaattccttgtcactcctctggatatttttctctcctccatggcacagcaccttccttcccaacatcaccgtaaaaaacgccttctctgggaggccctcctcactccctcacaccctcaatatttgctgagcatgcccggtgatagatttgggaagtccatttcaacaaggcaaatgatagctactcactcgcagagcttatgggaaagacagatttgcaaacaatgactataaagtatggtaggggaagttgggtctaagtgaccctaatctacccagagagcatccaggaaggcttcccgaaagaagtgccaatcaaggtgagtgctaaagaggaaggtgtctcccaggcgacactggcagtgtccagagacatttttgcttgttaggattgggctgtagtgctcctggcagggagtgggtggaggccagggatgctgctcagcaccctgcagtgcccagtacgggcccccccagagaattatctgatcccccaccatctgcggtatctgcagtgccgaggggtagaaacagctcttgaaggcttagtcccgtgctttctgtatgttgaccttctttctcacaacaccgtgaggtatttttaatgtctcttttccagtgggagaaaccgatgaaggtaatttacttgagggcacagtgaatgaccgtggagctgattctcaaacctgtgcagtctaatccctgccactctgcctctcccggccgaggaggagctggggagtagcaaagaggaaggggagaagcgctcagttggcggccattttgaggagcagggccaaggggcggggcggggcaatgcggggacggacggtgctgccaaggctgtgatggagacttggggaggaggtctggacggccagatgccggaatgctgtcttgctctgccgagggccaggcacccaggagctctgggcagaggtgaagtcagcagctcctggagggtgtttccattgtgggagtggctgaggtgactgagggggtagaaggaggagaggagtgggcaggacccaggcgcagaggggcagcagccagaggcaggaggaaaacaggggtggcggcggttggcgggggtggggggcactccagctggagcatctcccctttcttttttttttttttttttgtttttttgagacggagtctcgctctgtcacccaggctggagtgtagtgacgtgatcttggcttactgcaagctcctcctcctgggttcaagcgattctcctgcctcagcctccccagtagctgggactacaggagtgtgccatcacacccggctaatttt[156 bp omitted]gttgcagtgtctggggtcccctcccatcttgcaagggagttcctgccaccagaaagtttgtgaaggcagggacatctctgggcctccccacccctccttgctgacgtctgtctggaggtcagggctgtaatggcagttccatcatcaccagggacccaggctccttctgactcattgcttttccatccttatcatggggcttccaccttgaggtccactgtggctgccgtgctccagccatcacatctgcattccagccagaagccttgcttttcccatgtgtacaatggggattacatctaccttaggtcatcaaaaataggagatgggatagaagtgtctagtgtggagcctgctgtgattatggccagtaccccctagaggtgcttggtaagaccaaggttcccctttttttttttctgaggcggctgcaccctggggacctacccagagggctttggaggcacatgatggcctgcggacctcaagcgggctcctctttcctggggcgccatcccccatgctctgagctcccgctctccccagcctctcaggccccatgggcagggctcgggcctcctactctgggccctgcagtccacactgggcctggctcttcaggggctggggaggtgggtgagttggcacttgcctaatttggctcaggggtctcagctggaggaatgtctgaaattgtgacccagcagggggtggggcgagtggatttcctggctgatgttggcaccgtcaggacacagtggggtcctggagtcccagcccagggaagtgagaggcgattctagtgtcacctgagacagagaggcctgggctggggcaaaggccgagtgtccctgggagcatacggggcactggcctggcactcgggaaactggcctggctgaccagcaactgtactagcctctgtgggccaccctccctcccgcaggtgggccctgcctggttcctgagcccattgctctcctctgtagggtttcttcaaagtcctatagccccgcaccacagtcccctgagagggaatggcagcaacaacacgcttcctggctcctacccgaatctcaccgagtcatgctccttgtgaaatgggtccaggaatcggccatttttgagcaagctcatgcactgattctcaatgattctgaagtttggcccgagtaaaccctgcggacaaccaggggttcgcatccgagactggcacacccgcttcctccgctagatccgagtgggtctagcctgtaacaaatgtaaacaggaggctggggcggtggctcacgcctgtaatctcagcacactgggaggccaaggtgggaggatcgcttgagccaaggagtttgagtccagcctgggcaacacaggaagacccccatctctaaaaaaaaaaaaaaaaaaaattagctggatgtggtggcgcacgcctatagtcccacctacttggggaggctgaggtgggaggatcacctgagctcaagaggttgagggtgtagtgagctatgatagtgccactgcacgccagccgaggtgatagaatgagaccgtctcttaaaaaaacaaacaaacaacagaaaaaaacccaaagtgtaaacaggagccattgaccatcctggacaaagaacggtttctgcgccatcactggctcaggataggccttgctaaggaagtaaggggcccaggctccttccggaaggcactagaacatccccagggagcccgcaggcaagtgcagggggcacctctgtggtttcccctctgggtcttgagtggggcaggcccggcaggctggtgtcccacggcggggggacagggcctagagtgtggacagtgagtccaaaaatgggcacgctcagtgtgtttactgctatgaaaaatgagaccaggcctgagaggcttgtggcttcgctgccacctctgttcctcctcgtggatcggaaagacaggccagagcctaaggcagaaaccagcttgtattggttaccaggagtgaggaaaagccgggcattacaatccgttaactgtgagcttcagtgtctccaaggagaggagatgtatattttaaagacattctttctgtctgatttcaactaaggtttgggctatacgaccagacaaacagtgtgattattcccagcttttcgtttctaaagtgagcacgcgtctttgtcttcctgcacccctcactctggcgcaggcccagcgatgctctgagctcctgcgggcggggaagtaggtttttaaaggccacgtgagctgacattagtaccttctgtgtgaatgagaacaaaacatttgggactgaatatactgcaatgtacacattcataagaaacgttctaataacaattagcgcacaaaactattggtataaacatttttccaaaaagagaaaactattgcatttcgttagaaatcgcgtcctgggccgaggctcgtctttcttctctgcagttggtttggggacagaactccagcacgcagctgtccaactgcagcggctacgtgtttccatggagacaaacttggtgtctcaagttcagggcttcgaaagtcccgaatatttgtttgtcccgagagaagagttttgactttgaagaggtccaggtgggactcgctgggggtggggtgctccgggattagttcagagggaggtgttctggaagactccgtggagcgggacgcaggcactgctgtttggacgacacgcgggatggctgctttctgaagttgtggctgtgacactgaccctgttggacaaactccttccacagccagtggcttgatggtgacggtgaacttggacagagtcccacatccttcctgctgctgataaaacttctggttttgattttttgaaagacactgctgtgtcctggcacgagcgagcccgtttctgtggcttgttctttttcgagctgcggatctgccgggacacagcgattgtcagctgcccctcaagtcctttggcatctggagatgggttcctgcagcacagccggcctcccgcctcggggcatccggcagggaggtctggatctaaaaggccacagggcgctgcgcccagctgggtccctcccacatggtgctaccagacaagggcactccactttccattcctgaggggactccagggacgctggcgagctctgtgcctccccagcggtggcaggtaggaggggagaggccgtccctttctagtcgggctctgccaggtttttttaatttttaaaatcatggtgaaaattggttccagttgagtgcagaggccagtgctctcagcacagccctttcagctcttaaagggactggggccaaagtccagggttccagcagaggagggtttgtccagaataaggaacccatggtctggtggggccctggtggctgcgcagggacctggggacccagagcacagctacagccagtgggagccctggcctgggcttctgtagcttcaacaactgctttccttcttgaacactgaccccgggagcccccgcttgagtcaaagtaaacatcacatcatctaagaggcactaatttggtggagccggtgaaatccaggttcccagagtgaccaggcggcatcttttggaacctcgaggaggcgccggccggggctgctagatgccctgcagggagtggttggggtcactgcgctcccgctttaccaggggctcacccaggctgcgggcgtctgggcccgcctcgctgccacgctgctcatcgcccatgtcatctgcggagggaggggtagggtcagtgtccatcatcaggagggcacgagagggagagaaggaagtgcacgttccgagaactgctccggcacgccaggcagggcaccgaggatacatggcagcctgtggaccccacctcggcctctgctccaggctgacctgtcctccccacctgccgttacccagaggtgcccccagctcgggccaggcgaaagagcctctgccctgtgcctccctttcccagcgccgacgggcctggggcctgctccccacagggctggggcctctggggtcctcccacccgcatgggacagagacggggcccgggggtccctctggcctgcctgtcccactctcctgctgggcgtgggcgcaggagaccaggggctgcctagtctgggcctggtgctgaggtccctgggcagcggctacccagaggccagcggcagtctgagccccagccgagccagtctgcagtgtcacctgctgctcaggcatcacccactgtccggatgacagatcccagggccctcaccccccaaggggctgcccgcatttccacctgttcatcatgagatggggcagacaggccacggccaggagtaccaccctcctgggagggtcgtggtgggaaagccgcagacgcacctacctttgtcgagcagcgtcagcgacagagaggcgagatcgttgaactgaaagagaaacctggagtcaggggcgcctgcagaggggcggcagttgctgtttgggggctcgggggatgccggcccaaccttgccttgagccacgtcctccattcacagtgaagcagctggggcctgccctgaaatgtggctctgatgctgccaggtgtctgggtgggtccctgtgccctgtccaggccgcctctgggagctgctgggggtggagggtgctgactactcggggcagcgaggggacagcagctggctcccaaagtcccctgggtgcggctgctccgggttttaaggtggcatggaagagccgtgggccaaattatctttgctccctgaagtctgtacacagcaggaaaaccactccttggctgccccaaagcccggcgttcacgccaatgtgcagagaacaggcggcttccacagtttctgtacacgttgcggggccctggccaccgactcttagagtgctgtggcttctgggtagtaagagtgcagggaccccgccattcatcaagcatcatctcgtttcttcctggaggccatcccacgcagcccagcaagtccactccaaggtgtggaccccgaagaactgaacacaggagtgcacacaaacacccgcccacacacgcccacgcagccccgttcacgacggccacagagagggagcgaccgtgcagcacggagggacgagcggtcagcacagcgcggccagccacgcaccggaacacaactcagccaggagaggaaccaggctttgacccgggccgcagcgcggatgtcatgttccgtgacagacgccggacacaaaaggccacacagtgtgtgatcccatttctatgaagtgtccaggacaggccgatccacagaggcaggagggggctgcgtgggtgctgtgctgcaggaggagcttgggaatgactgctcctggggacggggtttccttttggggtgacggaatgttctggaactggacagaggtgccagctgcacgttgtggatgtgctaagcgccacttgattgtgcgctttcacgtggaaatctctccctatgtgtgtgttaccacaataaacagaaaactctgggtggtgtgtccgaggcctcccctgtgtggcgggacgcccaaggacaacctccttccagagccagcggtgcgatggggactgtgaacttggacagagccccaaatccttcccagtgctgataaaacttgtggttttgatgttttgagacactgctgtgtcctggcacgggtgggcccgtttctgtggcttgttctttatcgagctgcagctctgtccgggcggcagagcagtgggacctgcgagtgtcctctctctgggctgctcagagcacaccgccctctccccacaggcccggccaagccccggccgtcccacccaggagggtcctcacctctcccatcacagcgatcggcgtctctccggtggcctccgcgacgcggtgctccaccaggtagaacatgtactcgtcgtagagcaggcggatgaggtggaaggagccgaagctggcagcgctgcgcagggtcaggtcccggatcaccatggagctggggacaagcggacagaggctggggaccctcaggggagcatggaacccgggccccaggccagacttcatggcagcaacacaccccctgctctacgttccctggggaacccagaggctgagtgatcctaagacgtgcaggcctacgcgggggctgacgggctgccgagaccctgggcccacgtgacggacaggtggggccggcctgcgcgctcagttccagagaccacctggggaacaggagagggagatgggcagtcagccccaaagcgacaggctgcgggaaacaactgtggctggtgctagcgcaggcgctagatgggatcttagctggtgagtctttctagtgacatttcggactccgaatcagagcacaggctggcagctggtgcctgtctccccagcaggaggcgcctttccccaccttccccgtatccttgccacctcccgccattcctcagcctgtggtttcaggcacctaaaaacaagacaaaaagccagggtgctttagtctctgtcagcgaaagcaggggtttcagagacttcagcccagatccagtccgcgtccagccctcagcctgtgtgctgacaatgctttacattttgaaatggttggaaaaagtcaaaagaataattatattcggtggcacgtggaaattacatgaaattcacattttggtgtccacagacagtttcactggcacgcgtcatgcccgttcctatgttgtctttcctaggatggctgcaaatactacctggttctttctgggagaggcggcccctgacctaaaggatcagtataagaccaaagggggctaggcacggtcgctcacacctgtaatcccagcactttgggaggccagggcgggcagatcacttggggtcaggagttctagaccagcctggccaacatggtgaaacgccatctctactaagaatacaaaaattagtgaggcatggtggcacatgcctgtaatcccagctactcgggaggctaaggcaggaaaattgcttgaacctgggaggcggaggctgcagtgagccgagatcatgtcgctgcactctagcctgggtgacagagcaacactccatctcaaaaaaaaagaatgaagtggaacaatgtctcagtcctcctataagacctaaaggacttatatacagtggcacctgattaaaaactttggcctacaagccaggcggcccccaatgcccaactgccccggctcgaagtatactttcataaactctgttacgtctaatcggtatcgagcgataaaaagaagacacaggcttgagaaaggcaaagacagccgcactatgaagaccaccaaagctgtctatccttaagtgtcaagcatagctgcaaagcccccagccccctcctgttcctccgggcccacccaggttggcttccaagccccctttccccaaaggcctcccccacgcagatgaggtgctggcactctgcaaccagcttccccacagccccggtgtctggtgcgatgcttcagtccaaagtatttccagaacatcgcctgcggtcaccccggtatctctgggttcccaaatgggctcgcagctcccagagagtaggagcatcggccgaccaccaccaagggaggcccagccagagcttggggatgaccagccaaggcctcagtccacatgctaccattttctagtgggtgctacagaaataaatcccgtaaacctaatttttattttttatgactgcactgcacgtgcataagaatgaagtcagaccaggcgtggtggctcatgactggaatcgcagcactttgggaggctgaggcaggtggatcacctgaggtcaggagtttgagagcagcccggccaacatggcaaaaccccgtctctactaaaaatacaaaaatcagccaggcctggtggtgggcacctgtaatcccagctattcaggaggctgaggcacgagaagtgcttgaacccgggaaggggaggttgcagtgagccgagatcgcaccattgcactccagcctggtgacagagcgagactctgtctcaaaaaacaagcaaacaagagaatgaagtggaacagtgtctcggtctcccttgtgaagagcacccccaccttgcagacgtgaccccgatcccctccagctctgagctgtgctcttctctggctggcaggcacctcagtcctgcgctcactctgctcttctcaattcttccgcttgcaaccttccctctgtccatggagactggcatcggcatccctacgctgtctcttcccttgctcttcctccctcattatcccagtgtggctttattgtaatttctggctacactggtgtttctgttatgtggcagtggtgtgctaggtccatggcagagccgcatagtctattaggcgtgtggttcctctcattcattcactgagccagcatttaaacagaagtgaggtcccggcactcgggtagcgtgcctgatcatgcaggagacagacaacagacaagtgaacagatgacaggtgacggtcaatgccaggagaaaggcagggcatggggcatgcaaagtgggaaagaatgggccgtcttatttacagaggctgggggtgagggatttctctgcggatgatgggtttctctgtgtggctgtctgggggaaagatgttccaggcaaggggggcaggtgcaaaggccctgaggcagcgtggccaggggagtgtgtaaggagacagctgagaacaggggtgctggctggccagctgaggggtcagcaaacttgttcttattttttttttttttcttgagatggagtttggctcctgttgcccaggctggagtgaaatagcacggtcttggctcattgcaacctctgcctcccggattcaagtgattctcctgctgcagcctcccaagtagctgggatttcaggtgcccaccaccacgcctgactaatttttatatttttagtagagatggggtttcgccatgttggccagtctggtcttgaacttctgaccccaagtgatccacctgcctcagcctcccaaagtgtggggattacaggcatgagccactgcgcccggccaggcaaactcgttttcacgcttgccagatagtaaatattttcagctttgtagccaacagtcaaactgttttgtttgcattgacagctgtagctgatctgtgaattaatgcatgtggctgaggttccaataaaactttatttgcacaatgggctggggcagtgatatggtttggctctgtgtccccacccaaatctcaccttgaattgtaatgatccccatgtgttgtgggagggacctggtgggaggtaattgaatcatggagacagatgtttcctgtgctgttctcttgagagtgaataagtctcatgagatgtgatggttttataaaggcgagttcccctgcacatgctctcttgcctgccgccatggaagatgtgcctttgctcttccttggccttccgccatgcttgtgaggcctccccagccaggtggaactgtgagtccattcaacctatttttctttataaattacccagtgttgggtatgtctgtatcagcagcatgagaatggactaataatacaggtggggataacaatttggccctgtggccatagctcatccatgcgctgggtcacgtggggcctgtcagccacagaacagctttgttttttcctggggtaataactggctctttttttaaaaatgcacattttccatgtactcagggagactaaaactccttgacagaactgcaggaggcatcttggtgcctttcctggggacaatccctctggaagccttggctcccctgccctggtctgcacaggttaggtctgtagcttggaaatgatttcccttcagagctctcaggacatcgctctactgccttctgggtttctgcacattgttcggaagtctaatgctgctcccatccccagcctgtttctttctctctggaagcttttatggttgtttctcaaacttggtgtttcgatatttcaccaggagcctccttgtgcccttcagttctgagatagctttgttccccccttagagatggggtcttgctctgtcactcaggctagggtacagtggtgcaatcttggctcactgcagcctggaccgcctgggctcaaggatccttccacctcagcctcacaagtatctgggaccacaggcacatgccaccacgtccagctaagtttttttactttttgtagaggtcctgatattttccccagggtcgtctcaaatttctggtctcaagccatcctcctgccttggcctcccaaagtggtgggattataagtatgagccaccatgcccagccctcagtgatgatttctgtctgcagaacttgcaacttagtatttaggccacggtggccttctgggcctgcccctgggagccgctggtcatgagtgaggcccccagccaggtagttgttttttgcgggttcagacactgctgcaactctgctgagccctgttttgctctgagctcaccagccgagccccctaccctctagaagtttctctcagagccccccacccgccagaattctctcggaggtctggtgggactaacctgtaaaaggaccatttcagcaagaactgccgggcggccttggggaagctggggctgccggcatgctgcttcaggacctgggtgaccacactgtccagccagctggcccactggtccagggagctctgctgctgcagggtcagcttgaaatcctgctccagccgctgcaccacactctcctcgcactggcacacccacgaggcctgctcctgtgggcagggcagaggccagtgtcagcaatgtggacccccagccacggcagccctccctggacctagccatgctcagggcgggacatcgtgctgtgcttgagccttctcgcccttgaccttgacagctgcaagccaagtcctgtgtctcccgtcacaggggcagaatagagagctgagggggatcgtacccggcttccggggactcatacccaggtctttctggatcaaagctcatgctatatgaggtctttgtttagctttgtttcaaaggggtcacttctaaatgtatgtgtgtgcgtttatttatttaatggatagacgcagggcctgaaataagcatagctcggaagctgctgtgggccgacactttgccaagcccaggggacagagccaggaaaatggccacagggaggtcaacgtggtgccacgatcctggaagctgggggcctttgtgaggaaaatgagcagaagtgttggccacagcgcctggacgccagagggccctgagagatgatggagtggagagagctgggggctgtgggtgggctttggcctgggacccgtgtcatgcaacagaaccgtggccaggctcggggcaggggccaggttgtgccacgggctccacttggtgggtttgctggttttgctggagggcgggaagcccgggccctggggacggtgtggaggaagtcacctgcacgttggcaaagtccacgcggttgaggtcgctgagcatctggttgatctgggacgtgttctgcagcaccgcccgggccgcctgcgccaggtggttgagggacgtgtagcgccgcagcgtctgggcgaaggcactgacgacgcccacctgtaagccagggctcgtggtgagcaggggttcgcagggagagcctgttccgctgcgctccttgcaggggtgtgtgggctcagggacaacacagggaggagggagcaggaaacagcaacctgggcagggaagagggaacctcctgctattcttaaggacccagtgtgtgagaatcagtgaagaggagacctcgccggcacatcacacacgtcgctaactgaggcctgcgtgctgctgagttagaattcacaactgtcgccatgcccacttctagagtccctgtggttctctggaggggctgttgagaccacagactcctgagtgctacaggatcagacttttagtgggtgtggcctgggaatcttattttttttaagagatggggtcttgcttgttgttgcccaggctggtctcaaactcgtggcatcaaatgatcctccagtctctgtctcccaaagtgctgggattacaggtgtgagccactgcaccggccctgaatgtgactttttaacaatgacctgatcaatgcttgcatcactgcctaacagatcaattccgaagagcaggcgggtgccctgcagctgcctcctctcacccaagagcccttcaggaaatgctcatgatggctgggtgaggtggctcacacctgtaatcccggtactttgggaggccaaggcaggtggatcgcctgaggtcaggagttcgagaccagcctggccaacatggcgaaaccctgtctctactaaaaatacaaaaaaattagccaggtgtggtggcgggcacctgtaatcccagctattcgggaggctgaggcaggagaatcgcttgaacccgggaggcagacg[138 bp omitted]tcggccaaggttctacatttcaaattcgactgatttgtggccaagattgcagcaataagggtcacagcaaggagattaaatttcccgaataagatgagcacagaaacacgcaatctgttctgaattgacccaaagatgtgacatcaaatgacatcttctgttgttccccttcctgccagcactgacgcgtcaccggcagtgtgctcagggcttcctgaagggatcggttactctcatgacgcagggaagaagccagcgctctctgggacacagtggtcctcatgctgtcctggactggagcccctcccagccatcgttggggagcccaggccccaccccggacgcaccttggtctggatgacctgttgtgggaagtcactcatggcatttgtcaaccagccttccaagctcttggcaaagttacggatggcctgtgtcaaggtacctgggggatacagaccatgatattaccagggagaaaggcagtgactggaccctggaaatcagcattcagtgtaagagctggcccaagtgcgatgaaaatgaccaccatgaagaacgagccacacaggcgacggggaaccgaggacacttagaaacgggaagaaccaggcatggcccagcgctgctggtcaccacccactgcctatgcgggtctcacaggggcgattctgccccaggggacactgggcaatgtctggggacgttaatggtggtcatgactgcagggtgcctcaggcatggagtgggtggaggctagggatgctcctcagcaccccacagtgcccaggagggccccaccccagacaacgatccagccccagatatcaacagtgccaagggaaagaggccttgacacaaacacacacacacacgtaaatacattctaccaacttcctaatttattttaaagtgggttagaataagaagcaaatgatcagactgttaaaaaaaaaaaaaaccaaaaaacaaaaacagaaaaaggccaggtgtggtggctgacgcctgtagtcccagcactttgggaggccgaggtgggcggatcacctgaggtccggagttcgagaccagcctggccaacatggtgaaaccctatctctactaaaaatacaaaaatgatctggacgtggcggtgggtgcctgtagtcccagctatttgggaggctgaggcaggagaatcacttgaacccaggaggcaaagactgcagtgagcctcctgcaatccagcctgagtgacaagagcaaaactctgtcttaaaaaaaaccagaaaaatattttaaaatgcaaaaggaaagataccccaaactcccaccataacatagaaactcagacgaggcattgccctgaacagttttcaggcagacaggcaaggccaggccaaatgagaaatgcaatacttttgctgtttcccatcttccagcaaagggagcatagagtttactcaacaggacggagagctgcctggtactaacgggcatgcatatttgtggatggcctgaggggcacggtccatgggcccggatgtttgtggatggactgcggggcatggcctgtggtcctgatgctgtgatttatgaagagaggcctctgtgcccagcttccttgacgacccccagggttttggggagcttggcacgggcctggcccgagggctccctcgtggtgggtgctgtcattgcctcaggagctggaggccctgggaggtctccaagggcacgagtgatctctgccgtgggcctagcttccttcctcactgtgcctgtcactctctccccaccccaccaagtcctgtgggaaatcacagggtggggcgctggggtgtaaatgtctcctggaatcccacggtgctgggaagtggggtctggctgggggttaaaggtcagcctctaccctaacaggctgcaggagtccagggccatgtcccagcttcttcttctgagtttatgtccctgcccctcctacaggggtggcactcaggatgtgtcacagtggggcttaagggaggctggaggaaggtggctggtggtcgtctgcaagaccagggtgcgcagcaaccccacatggccctgggccaaggcctcccgcacagtgacggctccagggctgcacacaggctactcccagaggccggcctgcatgcccccagtgaaccttctagaaagcaccgagcccagcccagctactcttggctgtgtcctgacagcaggtagagctcaccagagccactgtgaccttcccctcgagtcagagacaaggacaaataacgcatgccagaggggacacattctacggcccacagcggctctcacttagggattttttttgagacagggtcttgctctgttgcccaggctggagtgcagtggtgcgatcatagcttactgcagcctcgacctcttgggctcaggtgatcctcctgcctcagcctcctgggtcgctggactgcaggcatgcaacaccacaccagctaatttttgtattttttttagaaatggggtctcactatgttgcccaggctggtctcaaactcctgggctcaagtgatccttctgcttc[133 bp omitted]ggttaaagctattctcctggctcggcctccctagtagctgggactacaggcgtgtgccaccatgcccggctaaatctttgtatttttagtagagatggttttcagcatgttggtcacactggtctcaaactcctgacctcaaatgatctgcccgcctcagcctcccaaagtgctgggattacagacgtgagcaaccttgcctggccccagataaatttttttttttttttttagagacagggtctcactatgctgcccaggctggtctcaaactcctgggctcagcgatttgtctgcctcagcctcccatagtgtggggatcactggcatgagccaccgcgcccggccacttttgggttttctgtgaaagcgatggtctgaggtggctgaagacgtacatgtaagaaaggacagaggaggcaggaagagaggatggagcagcgccgggcggggccgtgggtcacttactggggaccggcctcagcacgtcggggatgagaatctccaccagcgcctggtagaggatgtggtcgcagctcctcatccacctgaggatggggtcgcactgacacagggagataagcttgtccttgggcaggacggcgccctcggggtcttcgtcactgtggagggaggggggacaggtgagctgtggcctggcccaggtgggctcactcagccacgggagcgagcagagagccgggctgcgggacttttgcccaacagtggggctggggttttgctccccatccctgagcctcgatgggtcccctccctccatgttgctcccggcgcctccgtgtttccccctgtccctcactgtccacgctgtccctcccctgccagtggtcatactgtcatactgcgtctcactgcagctatgggttggggtcacttctacttgggattgcatcatggtcacctctaaaatcctccctattcaaacagtctgaccctgcaaaggggcggatggcaatgtgaatttcaagtcaactctaccaagtctaaaaattacagggatggaggcagaggggtctgaaccctgattcttggagagctgaggctttcgtttgtgggttacctgtggacgtcagcagggggttaagtctggggtggctgtgaacccagccagggtgtggcagtcacctggcaggaagagaggtggggccgtcgctggaggaggccttagagttccagaaggagagccacagcttctcgatgtagtggaactggaggttcatcaccacatctacagttgcctaggaatgaagggaccggtgagacagacgggtgcgtgcgcccatcacgtgcactcagcacacgtcaagtgagcagccgtgatccgggctacagcggggtgccctggaatcccaagggaggccacagagaggagaggagcaggcgatggacatggatgcggaggggctgctgcttcagagaggatgcttgttggggggctcggggctccagctcctcagcgtcacccggggacgcctggcctgagcgctggcggttcccgggagggacacgcaggagctgcctgcctgggctggggcggtcacctcgcagtgccgtctgtacaccagctgcagggccttgacgtcgtgcagtgtgacgccgtcctgcagcaggaagctgcccaggtcgggcgctgggaactcggggaagacgtgggagacatctgggggaggaacacgggaacatcagaaatggcgaggctcttaggacaccgtggacaactggaaggccacggtggatgggggcccagaaacagatgttctgccccaccccatgcagtcagggaatttgttttttctttctttttctttttcttttttttttttttggagacagggccttgctctgttgcccaggctggagtgcagtggcacgatctcggttcactgcaacctccagctcctgggatcaagcgattcttctgcttcaaccgcccgagtaactgggattacaggtgggcgccacgatgccagctaatttttgcattttttagtagagacaggatttcgccttgttttggccaggctggtctcgaactcctgacctcaggtgatctgcccacctcggcctcccagaatgctgggattacaggcgtgagccaccatgcccggccattttttttttttttttttttgagatggagtctcgctctgtcacccaggctggagtgcagtggcacgatcttggcttactgcaacctcctcctcctgggttcaagtgattctcctgtctcagcctcttgagtatttgggattacaggcacgtgccaccacgcctggctaagtttgtattttttttggtagagatggggtttcgccatgttggccaagttggtctcaaactcccaacctcaagtgatctgcctgccttggcttctcaaagtgctgggatggcaggcgtgagccaccgtgcccagtacagtcagggaatttctaagcatcagttttctcaggtagaaaatggagaggatattgtcacctcccaggaacattaaatatgcagacacagagaaagccctgagcccaggccctggcacacagcaagtacccacagagccagctcagggcagcacatctcggggagaaggccagccacggtgtccctgcagtgacctcctggagatgggcctgaccccacctcaatctctgccgaagactcaacccaggagggttctgtttgggctcaaaaaagatcataaacgacatggaagccactgagtgtgtacagagcccacctgaatcatgacatgccagtgagccttccttggccgccccccacccccctgccctccctcatggcaggctctgagttagggccttcccggggcagagatggcaccaccactaagccagctggggaagaacgctgtcccttgagcagcccccagggaagaggccaagactgcctcatgttggggaaccagaagcaccccaaaagctccaggcaagaaggaagaaagcccagatagcaggcaaatcctggtgcaccctgagtagagaatatctagcgttctttctttttttttttctttaattttaaaggcagagtctcgctctgtcacccaggttggagagtagtggcgtgatcatggctcactgcagcctcgaacttctgggctcaagtgatcctcctgcctcagcctcctgagtaggtgggaccacaggagcttgctactatgcctggctaattttttaagtttttagtatgttgcctaggctggtcttgaactcctgagctcaagtgatcctcccgccttggcctcccaaggtgttgggatcacgggcatgagccgcctgtcctctagtgttctttctgatggtcatttgattttattttctcatttttctgatggtcattttatatattaatttttttggcatgtgctgattattctaaagtctcagggatgtcagaaagaaggtttatcgaaaactttctatttgtccgaaaaggtgtctcgtaagaaaactgtcggaagcagacgcttagacaccactggttctgctggtgttgaaacccaggagtgtggcgagcagatgggagccccgcccccgggcctgaccgggcctctcacctatgtactgctggtggtgctggctctgcacggccatggtctgttccggagtgctgtgcaggccgctgtgggagccgctgtccccgaggctgtccgtcttctgggctggccggtacctaggccaggaacacgcataccatcatgaggcccagcagccctgctgcgggtgggcccaaagactggggggctgggcaggattcagtcaggcatgtgtgtgtgatgtttacaagttgcggtcaaatacacataacacaaaagctaccatcggaaccatcttgagtgcacagctcagcagcattaagcacattcactggttgtgcaaccctcaccgtcgtcatctccagaacttgatcatcttcccacactgaagctctgtctccataaaacgctcactccccatccctgtccccagcccctggcacccctgatctgacttcccgtctctgtgaatctgacgactctagggacctcctaggagtggggtcacacaggatttgtccttttgcaactggtctctctcactgagcgttatgtcctcaaggtccaccgagttgtagcctgtgttggaatttcctcctttttaaggctgaataatattccatcatatggatgaaccacagtttgttaatggacacttgagaaaatagatatatattttccccctaacatttctctcttagaaaaaaaagtgaaattcttggccgggcgcaggggctcacgcctgtaatcccagtgctttgggaggccgaggcaggtggatcatctgaggtcgggagttcgagaccagcctgaccaacatggagtaaccccgtctctactaaaaatacaaaattagctgggcgtggtggcgcatgcctttaatcccagcgactcaggaggctgaggcaggagaatcacttgaacctgggaggcagaggttgcagtgagccgagttcacgccattgcactccagcctgggcgacaaaagcgaaactcggtctcaaaaaaaataaataaattaattaaaataaaataaaataaaataaaataaaagggagattctttgcgtgaatcacaaacatcttattattggtgcaatcttagaagttctgagactttcattttgagccagatggtggtggccagcctgtgcaggcagtgctgagaaacactcagcactttccaggcgctggactcctcagggcccggtgtgtggtgtggtgggggcagggagggagccggcttgagctggagcatctccagcggacctccctcctcaaatacgaagcggggccaggcctacagggaggcgggagaccatgctggcgaggtgtgtgtaaaccacctggctcagggcaggccgtgggcatcacacagacacaggctcaggctgtggcttccaaatgcaaatggcatcagcctgtccccctgaaatgtgtgtcgctgctcctaaaatgacacactgcctggagcacaggttcacagctgtctgccaggggcccaaattgaacaacagcagtgagctccagagtccatgtctgcagacaacgaggtacagaaggaatgctctggaaactctctcctggaacctccaactcctgggagtggctgtgtggtcaggagtcaatgggttacgcagagcagctggaatgggtttttgagccacacacatacacgggtggctctgtgcagagggtccagcaccaggtgtaaaggtgccacgtggggctattgcaatgtggcccctgccctcagggggggcacttgtggaggcacactgggaggcagtgatatttgaatgggccctaaaccaggggccagcaaactatggcctgagggccaattctgctgtttgtttttataaataaagttttactggcacacagccatgcccatcatcctcatgctgtctgtggctgctttcaggatgtagccaaattgaacagtcatgacagagactgtctggcctgcaaggctaagatatttgctctctggctctttacaggaaaggtttgctggctcctgccttagaagatgagaaagtttgtgatggatggagaagaggatcttccagaaaataaccagggctttccagccactggatccaaaggtgaagaagaagtcgtgacttgagcacatctgcttctttctcctggcttcttgggttatttgcagtgtcctctctctctttacttcctaagctttaaaaattaaaggtctgtgattccaactatatgacactggggaacggggaaactgtggggatggcagaaggattagaggttgctgcagactggggtggggagggaaagctgggtaggcagaacatggaggatgtgtaggactgtgaaaggactctgcgtgacactgtgatgggggacacatgtcattataggtttgtccaaactgtcgaatgtacaacaccaagagtgagccctgatgttgactgtggactctggggggtgatgctggctccgcggagggtcacgggtcatgagcaatgcaccgctgtgtgggggaggtgaatggtgggagaggcggtggggagcggggctgggggtgtagaacaactctctgtactttctactcaattttgctgtgaacctagaatggctctaaaaaatgaagtctgttaaaaacagttttaaacggttttaaaaaaagtctgaaaagttagctggaggaggttgcatcccagcctcctgtgtctcctgctagactcacctcagtctcagcagagggggataccttggctttcccaggatgctggagactggggagttatgatgagtttgtttcgtgttggagaaacacccacccctccatgctccaggggagagccagctcctcccagctcggcccggcacccacctgggcttctggtgcatgggctgctgccgcatggccatgtactgcgtgtcctcctgcagccggttcagtggtgagtccggcttcagacgaatcccatagtaatggtacttcgagttgcccctggaaaccaaacatcccagggtcagctccctttgcagatgtcctgaacaacaagacaggttgggattctttttctttctttcttcttttttttttttgagacagaatctcattctgtcgcccaggctggagtacagcagtgccatctcggctcactgcaatctccgcctcccgggtttaagagattctcctgcctcagcctcccaagtagctgggatgacaggcgtgagccataatgcctagcttatttttgtatttttagtggagacggggttttgccat[137 bp omitted]ctctgtcacccaggctggagtgcagttgtgcaatcacagctcactatcaggaggtcactaccaggaggtcactatcacttgacctcctgggatcaagtgatcctcctgcctcagcctctgagtagctgggacagctggcgtgtgccaacacactcggatggtagaagtgatcctcctgctgcagcctctgagtagctgacgtgtgccaccacactcggatcttgacctttcactttggcctctctggttcagcatttcctgaactgtgtgaggaatgtgatcaaggaattctgtacataatgccgttgtcatagagagtcctctctcacaggctagtataataaaggctcggacaagtcctgtgctgagaacaccaggtcagctttgttgagctccacatggcttatctccattattattaccattattattaacaactcttccccacccccttcaatcatctagtaacacgttttggaataaggcactgtttgggaaccattacattagtttattacgggagaatgatgatcagagggctttaaacaatttagttcagaaaacagctcacagagtccttacaggagggaagcattaacccacagacatggctgtggagacacccagctcacaggatgccatttctccagagctggcaacagggacatgcaggaagcacctgggtcctttctttttctttctttctttttctcttattattatatttttgagacagtctcactctgttgcccaggctggagtgcagtagtgcgatctcggctcactgcaacctccctctctcccaggttcaagaaattctccagcctcagcctccccgattagctgggattacaggtatgtgacaccatgcctggctaatttttttgtatttttagtagggacggggattcaccatgttggccaggctgattttgaactcctgacctcaagtgatcctcctgccttggcctcccaatgtgctaggattacaggcgtgagcaaccatgcccggcccttcttttcctttttaaatttcattgcaatagcagacagcctgggccctttctagatgaggtacatgtttagccaggtgctcggaggagggaaaacggggggaaatcagccttaatcctgaagccagcagctgggatactctgcaggggaggcccctccaggagcaggggctgtgtccccagagaccaggcttccctgtggcttcctcccgcttctgtccctcctctacgcatccacattccctaaggacattccctgtgaaggatgaaaaagtgtcagagaataagggactctggtcctcgtggatccaccgccacgccgtttatagacagccaggacaccggctttgagagcacgtgagtcagccccaaccccacaaaagcagatgccaagcctcgctggccacaggatcacagcctcagcaggcagcagcctactgcactctctgggccaccagctttgggttggaggtgctgctgtttctttctgttagaggagagttggcataattgcctgtgataagtctgtggcctgtgatgtcccggggctgccataggccaagagaaggcggggtggattggtccaggtacagcaaaagacaccaagaggccgggcacagtgactcacacctgtaatcccagaactttgggaggctgaggcaggcagatcacttgaggccaagagtttgagaccagcctggccaccatgtcgaaaccctgtctctactaaaaatataaaaattagccaggcgtgctggtgggggcccgtaaatcccagctacttgggaggctgaggcaggagaattggttgaacccaggaggtggaggctgcagtgagccgagatgacgccactgcactccagcctgggtgacagagcaaggctgtgtctcaaaaacaaaacactgagaaatggtaaatccagctctgctggataaaccagaggctacattttgtttgtttgtttgtttgacacagggtcttgctctgtcacccaggctggagtgcagtggtgcaatcgtggctcaccgcagcctcaacctcctgggctcaagtgctcctcccctctcagtctcccaaataggtgaaattacaggtgtgcaaatacgtgtgcaccactatgcctggctaatttttaatttttttgtagagatgaggtcttgctatgttgcccaggctggtcttgaactcctagtctcaagtgatcctcttgcctcggcctcccaaactgttgggatttcaggtgtgcaccaccacacctggcccagaggctgctctaaaacaaaaaaagaaaagtattgtttgggaaatttcaaaaggagagagaaaaccagagtgatccccacgtcctatcaccggcttctaaagccgacaccgtgggctacacctggccacagccaaggctgccgccaattgaaagtaactgcaagcactccagaggtggctgcgaatcaggccacctggaaaggaggaggaagcctcgcattttcccaaaagctccatttcttgggaaaggaagaggaagaacaggtgggctggggatcgtctacccacctggtgcccagccgccgcgttctcagccccataaacacagaacggatcagtttcccgaaggaggcggcgttcactgggtctagcttgtgctcctggcagtgccgaaggtagtggttgtaaagagaacttctggggagactcacaccttccgctgtttcataattatccaacagccactggagctgtaaaaagaaagacacgtctgcgtttgtcagaagcctgaggaacgctaacatgccaacgtggactcattaagagaattacttgcgttccctgtgttaccaaatgggatgaggaaatccatcttttctttctttttgaggcggagtcttgctctgtcacccagtctggagtacagtggcgcaatctcggctcactgcagcctctgtctcctgggttcaagcaattttcctccctc[224 bp omitted]agattaatgaatccctcattttcttttgcttattgattctttcatgtttagcctggttttcaggttcctggacttaatttgtaaacatctgggtgtgatcaggaactattagcttctgtcttcagtcccttaaatgaaatacccacacaccacacaggctttaacaccaaatcgctccccaacatacaggaatggagagaaattctgttgctgaacaggaagattgaagaagactcgggggccccacagccctgtgttctgtagtgagcagtgagctaacatgtactgagatcccttattgagggaggtacaaatggaaattcagtaaaatacacaaatgcttatatgcacggttttgtgtctaagtcaaaaggcaggacatagctacttgggaggctgaggtgggaggattgcttgagcccaggaggttgaggctgcagtgagctagggtcgcgccacactgtactccagcctgggcgacagggcaagacttcgtctctttcaaaaaacgaaacaaaacaaaaagatgggctaaatgagtcccgagccaaggactatgcctcgagaggtgaacatccagttagaagggctgcgagaactgtccacacgaagagctcagtccccacactgggcatggacgcaaaggtggcctgcccaccaactgatgccctcacccaggtgccttaaagactgcggcttaattctggtttccacctctccctctgctatcgtctgtcccctgatccagagaggtctgctatgtgaatacaaaaggcttgcactgatgcctgcgatttgcagaaagacaggaattccacgcacagaagcgaggcccgagtccagatcccatgtcaagagcgtcgggggaaaccagctgtctctacctggtcccctttgtgcgaggctgtcagctgctttgtctaggctgagccccgcttccagagctccgaagggctcctgctgcctgggcccttcagagtgggcagtgctgggtcctcagccctcccccaccgggcatgttgggctcctgcacagcccttggcctgggaagcccttgtccctgtgccccgcacaccccacaagacacaaagtaggcgtgtcccctgggaaatatctgtccactcaccacagcgtacccatggcacccccccgccccactgtcacgtttgcctgtctgtttgccccatccccacccccccaactcagcattagaagctggggaggaagaaagcattcatctccctttaattatttatttattgaaatggagtctcactctgtcacccaggctggaggtgcagtggcgcaatcttggcacactgcaacctccacttccaggcttcaagtgattcttctgcctcagcctcctgagtagctggcattataggcatgcaccaccacatctggcttatgttttttgtatttttagtagagatggga[140 bp omitted]cgagccctgcaccagcgaccagcacctcagaaccccttttatctcatctaagacccactcgatccagcctgtcctggcccctccagccctaacaggggttgacccagggccacagtggagtgaggacctgccctgggttctggaacgtttcacaggaggacaaacaggtcaaaggttcaggtgaaggggtgtgtggggcctgaacgcggaggtctcttaagccgaattgcaggtgagctgcggggctgagttccattttaggaagggggaagttaagtcttgggctggagttcagggtagagattgggaccagatgtgttactttggaaccaaagagctgaggacaaaacctccaaggggtgggaagagtcagtcacccagcaggggcactgcccacgtgggtgttgaggatgaagaggagcaaagcgtaagcctcgaagtgtgggtccaacctcacgtcctgcctctggggcaagccaggagggcttcagacctcctgaccacaagctcccctccagctctgctcctgcaggtaagtcccgtggccaaacatccctccttaccaaagggacaggagtggttcctgccacaatccctgagcttggattccggttccctggccgcccctgaatcactcaagtagcctatcacctcctcctcagcaccagggacccctcgccctcttgctaccacaaagtctgcctcctgccgcctgcagggccctgtgtgaagtgcagtgtcccccacccccccgccatgagtgcaggtgatcgttagcagttgccatcgttagcaggtgccaatttcatccgtccagcattgggtgccatgtgcttggctgtgcccataaccacagggagggacccccgccctcttgtcctttgaataaggggcagttaaaacaaaggaccctgagaagggcccggagtggagacttcatctcttcctcacttgcctctttgggaaaagggacatcagagttttcactttccatcaagtcattcacacccttcatcttccgactttctggactggactttttccaatacaatggaggcagtgttgcttttttctcctccaaagtccggctctggcagagtgcttggacccttaagagcttaagagctccggagtcttccctgtatttaatgctatgaatactatgaaccacaaccttgatgttgaagttagtgtgtgagtatgtgtgtgtgtgtgtgtgtgtgtgtgtgtgtgtatatacttttatatacttttttttttttttagagacagggatatatatatatatatatatttagagatagggtctcatcctgtcaccaccccaggctggagcgcagtggtgcaatcatggctcatgcagcctccaactcccgggctcaagtgatcctcctgcctcagcttccagaagtgttgggatgacagtcgggagctgcagtgtgggccctgaagcttttcttcccagtggcttcaccgtccggatttgtcatgtgtgctgattgatttatcgcctgttccccgcagactatgctctccctgagggtggagacggagccaggtttgcccatgtgagcatctgcaggatcctggagatgtctcaagcctggcagcagagaaagactgtccaaggaggtagatggggagcaacagagggtgtctgggtgaagaagccagaggcttcccttggtcattctgaggctgggggcacaggtgccacttcttagactgtcctccacaggcagcaggagccaaggccagtgacaccacatctcaaggagccaaatgacgatgcggattttcaggctaaaactgtgaggccagattttgcgggcggtgagctggaaggagcactggactaggagtcctgagaggttagagtataagactccatccaccaggaggacatactggctcacacataaaaagaaagttttggaacagatgatccttctgctgtttacccccgaacccccaggctatttaagagtagaatcctttgcttgggtaattacgttgacattgacactaaaaggatgcatagttgtcttgacagcaagtccttcttgctcaacatcaagaaaccacagagaagactgaagcggctggaacagtcgcgtctatttcctccctcttctgtgttgatgaacttctgggaggagaatggggttagaaccgaagtatggcttgcagactctgttcagggtctacgcctcaccagcaggctgggagccacttatgcaccgggccttcccatccctcggtgctggagcccacacctggcggcacgtcagactgcggcaagcatcacaggtcagttccgtgaaaccgaccacgagggtccagccgctccaaccacactcgcccacctcccctgctcttgagggctcgggtaccttcatgccaggaaaggcagcagctggacggagtcacctttctggtttgggcatgttctgcagtctgctttgtctgctgatatttgcattctttctgtgtcaatatcaaacacaaataagcagaacgctttccaaggaaatgtacatgtgtacccacatttgccacaatctgtcaggacagcacacttcttgatgaaatggatcaaatcattccttttaaggaaaaaaaatcccgaaatgccagcgcctccctctccccggccccccaacaaaggcctgtggttctgggctctttgcaggcacagcccctgtggacagatatcctcacctgccggtgggaaggcagggatcatgcccacctacctggccccctttgtctcctaagatacttgtttctattcctgggggcaaatttgcctgacactggctcctggtggtgagttagagtctcaccgggccatacactagcagctcgggcagctattccaaccgtccaggtgtgccctgtgttgacataatccgacttggaacatccaccttttcacccattccacaaatatttacgagagctggctctatgccaggccttgtttaggtgctggggatgcaacggcgaataaaagacaaaaacccctgccccctggaagcgtccgttcttgtctggcagagacccacaataaataagtaaaatgaaccgaatgagggctgatgccgagtgccgtcagagaaattcacctgggaaaggggatggggtcgccgccacggagggactggagggaggactgcaacggtatagtaagttgaggtggggtgggggtgtcaggcagggctcactgagaaagtgcccactgagtgaagactcagaggaggtgagggggagcctggggaagagagcttcaggcagagggccccacagtgcaaaggccctggggcaggtccgagcctggtgcattggaggaatagcgaggaggcccgtgtggctggagcacagtgaggagtgggagagagcgggtcctgcagggccttgtgggccattttgacaacactcggttctacttggagggccaaggggagccctggaggcttccaagcagagcagtgtggcgatctgacctgggttttagcaggatcactctggtggctgctgtgagaaggggctggaggctgggtaggggtgggtgctgacggctggctaggaggtggccgaaagaatccacagggacagtggcggctcgggaagtagtcgaagtggaggaggtggggggtgccacctggttctggatctttcttgaaggtgaggttgaagagcatctgggggtgggcatgagaggagcaaggaggcgaggacgcagtggggttgggggccgagcgcctggaagattggctgcccctgcctcagatgggaccgtgggcgggaggcgcaggggttgtgggaggcgcaggggttgttgagggtggaggccacgcactgagctaagacactaatccgaggcaggcaggaattccaagggaaaacagcggcacttctggacagaggccccttctgaggagctgccggctctagcaaccccactgtggcctgcaggacagcacggccatcgtgccaggctacacaggtcaccagctgaaggctaaatgacctttgacaatgtgtgtttcttgatttcaaagcaaaaagtcacataacccaaatacgactcttccacacgcagctctctcccgcagggtgtgcaagtgatgtgtttactttagcagacagcgccacctcatggtgacagagactcggtgaacctgctacggggtcccggtcggctggtagcctgagggcagcccggtggcccccaggggctgaggccgcctcttctgctcaagtcggtggcctgccacacccggtcgggtgaagacatgtttcatccccagccccggctccgtccccttccctctggaagagctaatccccattttcacggcgccatatcatgcccttttccagtttggacactgctagggggcctcctcctccctgggagtttccacgccaggctgaccatcagctggctggaaggttcttccaatgtgcagacctccaggccctgcagaccccctgggtccaagcccctagaggggaggcctgggaagctcctgttgaccggctgggtctggacaatgctgtctcgttttaccaggctcccagcacctgaatacaccttccctcctgagacagcgcagaggagggaaccagctccgcggaacacgtggccagctccgctcagagatgtctgtgaggggttccctaggtgggtttcccacgtcttccaccttctgccctcaaatgctaagctccctggagtgacttttcctccttttttactccctatgttcggcactgacctggccagaaccctgcacacggtagacggtggtctgacgtcaccagctggcagcaaggaagaggcgcacaggccctgctgctggggcgacctgcctggggctgtctgagaagggaggtctgggaggccactgggaaaatgggtctccagggcccagctgctcccacacacttggcttatctgccacagggtcaggctggcaggggaggtggcactgtggctgtgcccccgcctgacctgcagaaggccgctgcccaccacgacctcagtctcagccacaggcagccctggggacaatcgttgcaagggcacgtcaccccgtccatcagcagatcacgtgctttaactcctctcttcctctctggctctcacatttgccaaaacaagatctaagtttattctgcccgtgtgtgtggtgaactttttagaaagatcttattttacttcctttgcttcgagtcaccaagcccggaatcttactgatcacagctcatgacagaaggaaacaactcaacagcgaatcatcagtgagtaaaagaaacgagagattttaccttcagctcgggaatacgaatcttcatcggggaagcgacctgagaaagtctgcctttcggatgaagtgttagaaagcaggaaggatcccagcagccagagacaagcggctcatgcattttcccatagacattttttcttttttttttttgagatggagtctcgctctgtctcccaggctggagtgcagtggcgcaatctcagctcactgcaacctccgtctcccaggttcaagcgattctcctgtctcagcctccagagtagctgggactacaggcatgtgccaccacgcccggctaatatttgtatttttggtagagatggggtttcgtcatgttggtcaggctggtctggaactcctgacctcaagtggtacacccgccttggtctcccaaactgctgggattacaggcgtgagccaccgtgcccagcccattttcccatagacattttaactctcccgtggacttgctgcctgtccaggctctgcacccccatcctgcctgggtcacgcagccctctcgcccagggctgataccctggacccgcatgggtttgcgttcaggctgaagatggcctgatccttgctgaatggggaatggtattctgcacattttcccatgtatgtgctctgagtttaagactgggggctggggagatcctctctccaagcacgtgtggaagactcccttctccctgagttcatctacagggaggatgtcatccagcagtgacagatgacaggatgaccatgtcctacccagcctggagaggggcggggcactgagcaggggtctggcatggtgtttgttttgttttgtcttttttgcttcaagacaatcggcagaaggaaatatttctgccatttcttctagtgaccagccccctgaggcaaagggcagaggcctcgtcaggggctgcggtgagcaggtgaccacacctgtacctaacccataacccaggtttctggacctgtcctacatcactttctgcccccagaatcactcactgccttttgataacgcctcattttacacatcggccagcacagaagtcaggatggaatcacagtgaggacgggagtgaggacgggatcacggtgaggacgggagtgaggacgggatcacggtgaggacgggagtgaggacgggatcacggtgaggacgggagtgaggacgggatcacggtgaggacgggagtgaggacgggatcacggtgaggacgggagtgaggacgggatcacggtgaggacgggagtcaggacgggatcacggtgaggacgggagtcaggacgggatcacggtgaggacgggagtcaggacgggatcacggtgatgactggggtccactgaaggggacttcttctctgatgtctgaattctcaagagaatgtcagagcccagtttaagtgctagagagcaactactagaaggacattctgacttcgatggcccgtcccagtgttaagatgccgaacacatttccagctatgtgcaaaaccgaatcaagagcgtttggggagaagtgaaagcgatgagtctgagggggccagagctttccttctctgttgtccctggaaataaagacggagcctgccacgtcccccagtcccatcctgctacagggctgtgcagagctgagatgcccccaacctcctgtcatggggactgtgatcacggtcttctcccaagagacaaggggaggagaaaaatcctagacgctaaaatctgtatgaattagctgctttatgcttttctcaaattactgtttctttccaagagaggatcccaagaaaattagctaagagtctaaggcattcccgatcctatgtcattttctctcttttttgttgctgttgctgatttttgtattgtttttatttttcatatataactatactgcttatcacctgccaggtattgttgaaagtattttacgtacattaaataatttactccctatgacaacccgaggaggtaggtgttgttattatctaccttttacaaataaagaatctgtcttgatttctccttcattgctgaagggtattttttgctggatgtaggattctagattggcttcccctcaaccacctttcacaaatgacactttaaaggtgtcattttattgtcttcttctttttttttttttttttttgagatggagtctcactctgttgcccaggctggactgcagtggcgtgatctcggctcactgcaacctctgcctcccgggttcaagcgattctcctgcctcagcctcccaagtagctgggattacaggcgcccaccaccatgcccagctaatttttctattttaatagagacggggtttcaccatgttggccaggctggtctcaaactcctgacttcaagtgatccacccgccttggcctcccaaagtgctgggattacaggtgtgagccaccgcacctggttgccttcatttgtcttaaaaatgtctatgcaggttacaagcagagcagggacaggttgccaggtcagacgcacacttacatggctgttgagtaaaccgcttttgtgtgatgtgattccttcgcttttttggaggttttcaatcgccatttcaagctaaagaaaatgtgtgcagaaacaaaacaaaacaaaatggaaaaaaaaaaaaaggaaatcagatggttagcatcagccaagatttgtttttattaatatccaaataatgattcgagctcctacaaaataaaaatgaggctccacgcaggcagggcgggggtgagttaaattgtgcatgaaagctgcggtagggagtgttgcttcgcacacgtaggtaagcccgagagcccgtccaacagaagcagcagaaatcatgttgtaaaaacttgctactgaactttaacctggcatatgtgtgtgcacgccgtagcattaatatgcagccactgcatccattccagtgtcagccaagccagcatcatagtcacctgctcctttccccacgccacatcgatggggaaccagaatgaaagcaaggagagatggcagccttgactccccagccaggctgtcctgtcgcaaatcccagggtctccccgctgctggaggctttgggaaaatagcagcgaggccaaagactcagaccctgccaccaggaggccgtaggatccagggccactggacactgtctggcgaatgtttacccagtgggagctgtgcgaagaagatttttggaaaagagaaaagagttttggaagaaagagttgggcagctaacagcagaacttcctggaggaaggggcttttgagttggatcctgaaggacctgatggaggtggggagggaggtgggcggcaggtccacgcgatggaggaggcacacagctgtgcgtggccactaaggcattcgcacgcatttggtttgtcctagactcgcacacggaaaacagcgacgtaaaatctgctgcagcccaccctgacgaccagaggactgaagcgggaggagatgaacttgaagtatatgcttcctttcttaaggaggccaaagacttgacacttctgcaaagagcaggttgagtgtgtatttcagagagcaggcgagcggagctgagttcaagaatgagagggtaactgcttctcccacggcctccgaccacggtggttctgccttctctcattagctacccttgcttcaagccaaggaggacgtcagggtcacctttaagaagtgcagaaggtacactggaggaccaggggaaagtaggatggtgagacctctcccacccatcagcctcagggtgcaggcgatgagaaggcaatcgccacctctatgatagaaaaaacacacatgccacccccatgtcttggggccattctgatctgcagcttgggcagccacgtgagtactgccctgtggcaccttccctgtgggacatcgctcacctatgggtgccgggagagcagagtgcatgacctctggaagtctgccctaatctcagggggccttgtccagtgcccagcagactgggaaggagaagaaaacactgtctctccaacatagtgggtctcaatcatttggtctattaaaaaatacactattacaaaattttgagatttcaccacccacccctgaaaaagagctttatttacttatctttttcttgagccagagtcttactctgtttcccaggctggagtgcagtgatgtgatctcggctcagggccacctctgcctcctaggctcaagtgattctcatgcctcagcctcctgagtagctgggattataggcatgtgccaccacacccagctaatttttgtattttttagcagagacgggatttctctacgttggccaagctggtcttgaactcctggcctcaagtgatccgcccacctcggcctcccaaagttctgggattacaggcataagctaccacaccctgcctgcttttgtttttaaaagttaaatgtattatttcccttattagaaatcaaaatagataatttttaaaaagatgtattaattcattaaaaaataataaacccattataggttaacacttgaagaataggtacactttccaaattaaaaaaaaaaacaacaaaaccaaaagaagagtggaatgattccgcatcttcacaaatctgtagagtgcgtgacttacagaagacaactctacacatctacttctgtatctccatctgttattgtatactgttttagttgaagtacattgaaaaaacttggcctcacacagatatatagttggaaaaggagcactgttttaatagccttttcagataactggggatatttttacttgatactatagcaacacttgacagctggtaatttcttaaaggttagctgcaatgtggaatctgaaaccatatcaacgagcttttcatcctcagttacattaaaatccattaatcttgagctgacatccatgacaatggcagagtaaggaactctagaacccatcccttcacaaaagcagtcaaaaaatgggcaaaaattgtcagaatcgactttatcagaactctggaaatgaattaaaagattatggcaaacaggtgaacccttaattaaaaaaaaaaaagatgaaacttggcatttaaggaaattttcgtcagatcactagctgaccactaaggtaactgaatagagattttggccgggcacggtggctcacgcctataatcccagcacttcgggaggctgaggcatgtggattgcttgaggccaggagttcaagaccagcctggctaacatggtgaaaccctgtctctactaaaaataccaaaaaaaattaggtgggtgtggtggcacatgcctgtaatcccagcttctggggaggctgaggcagaaggatcgcttgaatccgggaagcagagattgcagtgagccaagatcacaccattgcactccagcctggccaacagagtgagactgtctcaaaaaaaaaaaaaaatgcagattttacaaaattagttcagaaaggtcatgaaacaaacgatcaacaacacctataagcagcaacagcaaaccctggggagaacagaagaatccaatattcagcgtcaccatgttaaactattcaaaatatccagttttccacaaaaattatgaggcacgcaaaaaaaaaaaaagaaagtatggcccatatgtagaaataaataaataggactatctctgagaaaatcgagccactggacttatgaaacaaagagtttaaatcaactatataaaatatacttaaagagctaaaggaaatcatgtacaaagcactataaaaaaccatgacaggctgggtgtggtggctcacacctgtaatcccagcactttgggagggtgagttgggtggatcacttaaagtcaggagttcagggaccagcctggccaacatggtgaaaccctgtctctactaaaaatacaaaaattagctaggcgtggtggtgggcgtctgtaattccagctacttgaaaggctgaggcctgagaactgttgagcctgggaggcggggtttgtagtgaactgagatcacgccactgcactccaacctgggtgacagagtgagattccatatcaaaacaaaaacaaaacaaaacaacaaaaaaacacatgagagtgatgtttcaccagtagaatatcaataaggagacagaaattgtaaaaaggaaccaaataaaatttctggagttgaaagtataatagctggaatgaaaacttcactaggggaggttcaacagcagatttgagcaggcagaagaaagaatcagggaacttgaagatgggtcaattgagattacccagtctgaggagcggaaagaaaaaagaatgaagaaaaatgagctgagcctaagaaacttgtgggacaccaccaagcttaccaacaaacacacaataggagtcccagaaagagaggagagggagaaagtggtaaagtctatttgaataagtaatggctgaaaacttcccaaatttgatgaaaggcatgaatctatacactctaaactaaatctatacactcaacaaactttaagtggcataaactcaaagaaatccacaccaaagacacattataatcaaactgttgaaaggcaaagacaaagagagaatcctagaagcagtaggagagaagtggcgtcacaaacaaagaatccagaatatgagtaatggctgatttctcaacagaaaccatggaggccagagggcagtgaaacgacttaatcaaagtgccagaaagcggaaaaacccacatgtcaatgagcagatgaatggataaacaaaatgtggtccatccatacaatggaataatttagccacacacaaaaaaataaggttctgacacaggctacaacatggatgagcctcatgcaaaagactatatattatataattccttttacataaaatatgtagaattggcaaatccctagagacagaaagcagattagtggctgtcaggagatggaagaagggacaatggagagtggctgctagtggggatggggtttcctttcagggtgatgacgatattctggaactagataatggtgattgtaccacactgtgaatgtattaaatgccactgaactgtccactgcaaaatggtgaattttatgttacatacattctatctcaataaaaaatatacatataactaatttcaaaaagtaattttagtctcccttgcaacttgaatgagtattttactaatgggtatggttttgtaacatcatatactggtcacttgaaaaacatgagtttactgagtttgcagatcttccagacattgccacatttcattacatagtgtcaagaaatcacattcattaatatcaccaccaacctcatcagaaaagtcactaactttgagaagttgtcaggttcctggttggcagacacaactccaaaattttcatttctttgtttaaaaacttgaattttatcattggccacaaaaacctgccagctgtttttcttaatatgtcaggctttgttcatttttggaaacatgtctgccaaatacctgagtccgaataatcatagtttgtcattctttcaagcagaaatggagttttaggaaaaccatggctagttctgcccacacgtcaatcaagcacacacaggcttttcttggaggtggtcattgtactctggtggacttcccatctcatcacacacaatagtaaagagatgtgtgctcaagagttgaaatttaataaaattaataatttttactgcttcatcaaggacattcttaaatgaaactagtatttcctttctttcttctccttcccttttttttttttttttttttttttgagatcgagtctcactctgttgcccaggctggagtgcagtgttgcgatcttggctcactgcaaccttcaccacccaggttcaagcaattctcctgcctcagcctcccgagcagctgggattacaggtgcccgccaccatgctcagctcatttttgtatttttagtcgaggtggggtttcaccatgttggccaggctggtcttgaactcctgacctcaagtgatccacccgccttggcctcccaaagcgctggggttgcaggtgtgagccactgcacccagcctctttctctcctctcttaaaaacatcttttagaatgtgagcatgtggtgatgaaaaatacagtgacttctaggacagtttgatgcctctgcattcttttttaaaaaagaggtggggtctctctctgctgcccaggctggagtgcagtggcatgatcatagctcattctggagctagaagtggccatggtgtagggagggagaggaggtcattccccaaaaacccaaatatggagacacgagacagagagggccactcccaaacctgctgtagttaattcaccctctgttctaaaacagaacttagacatgttaccatagaaggagccaattcaagttaaaatgctaacaaccctttggggtctttatagagaatgcagattgtttttattttattattattattattttttgagatggagtcttgctttgtcgccatactgcagtgcagtggcgcgatctcggctcactgcaacctctgcctcccaggttcaagcgattcccctgcctcagcctcctgggtagctgagactacaggtgcgtgccaccccgtccagctaatttttttgttgttgttgtattttagtagagacagggtttcacca[133 bp omitted]atgactggaattttgaaggcagagtggtaaatcatagaattaggcctggagaagggaaaagcccaacgctgtggtccaggcagaggaggccagcagggctgagaggctgggggagggagatggggcattttaatccctttgtctgttcctcccaactcccacttggcagggggagcccccaccaatatctctgtgcacgtcctttgtggggcatgagatcacattcacacttgctttaattattttccctcagtctctatttagttctgcaacttgtgtttgttacttaatattttgtggctatctttctgaaccaattctgttgtttgtttctttgttttgagacagggtctccttctgtcacccaggctggagtgcagtggcacgatcacagctcactacagccttgacctcctgggctcaggccatcctcccacctcagtctcccaagtagctgaacatacaggcatgtgccaccacaaccagggaatttttgtattttttgtagagatggggtttcgcaatgttgcccaggcttgtcttgaactcctgggctgaagcagtcccacttgcttccacctcccaaagtgctgggatgaccagtgtgagccaccgcgcccagcaggaccgattcttagagccactgggatgacaggcatcagccaccacactcagcaggaccgattcttacagagccactgcgcactcttaacttcaacactcttaactaatccacggacgttatagaatatgatccattttctcactaatgtccttcctctggaccaggacccaatctgggatcacatactgtgatcattttgcatacggtgccatgaaagaaaacaggaaaataagaaatgggtcaacactcaagagatccatcagtagctaatcgattattagatcaatgatcaatttgtccctggttgtcttaacagcttgtcaagtgaggttatgtcacttcagacaaagaaggatgacttgtctggtaaatcaattgaaatgcttcagaataagtgaaaaatagtgctttttgtatgacagtctttaatcttgtcactacaggcaaatctgagactaaatcttcaaacatatctttcaaagggttacttgtaagtgtgaacctgggtacttttcccacctttgcaaaaaaaaaaaaaaaaaaaaaccctataaaaccagctttgaaagtgaagataggatcacacacttgccagaacccatggaacgcataccaccaagagtgaaccctaatgtgaacgggactgtagtcaacaataatgtatcaatattggatcatcagctgcaacaaatgtaacaaacaaacaacttcaaactgcaccacaaagggaactctatgaagttttaaaaaaaagtggtgataaatatcatagtgagagaaaaagcagatgtgccattggtgacattcctttatcaaacagtatcttgagtgtgggaatgtcaaaggcaggcagtgggaagagcgattatcatcatgtgtgttggctggcaaataattcgctctgatcattggacaaaagctctgctatgcaggggctgagcaggcttctggcagatggtaggagtacccaagtgatttatttttatttatttatttagagacagagtcttgctctgtcacccaggctggagtgcagtggcaccatcacggctcactgcagcctcaacctcccccagctcaggtgatcctcccacctcagcctccttagtagctgggactacagacacacactgctaattttttttttttttttttttgagacggagtctcattctgttaccaggctggagtgcagtggcacaatcttggctcactgcaacctccgcctcccgggttcaagtgattctgctgcctcagcctcccgatgagctgggactacaggtgcgcaccaccacacctagctaatttttgcatttttagtagagacggggtttcaccatgttggccaggattgtctccatctcttgaccttgtgatccacccgcctcagcctcccaaagtgctgggattacaggcatgagccaccataccagcccaatttttaagttttttgtagagatggggtctcactatgttgcctaagctggtcttgaactcccgggctcaggtgatcctcccaccttagcttcccaaagtgctagtattacaggcatgagccactgtgcccaggtgacttttcattctacatcttcactgaagagccaggctacagaagaagagatgtgtgtgactcctgattctgtcatgagctgtgccactgcgtggaggtgccatgggcctctgcgagccacctccatggaccaccaggaaggggtgctctctgaaccttttctagttctgagggctgcctgactggagagttgttctttgctcagatagactcttgtttaatttaccgaaaatttctcttttaatggtattatgtatcgggtatcataagacacccttcttgggcaaaaagaaagctgtcaaaggcagaatatttagcttgttaaactaataaagtacagtaggacattttaacttcagctgcaattaaaatccattagacttttttgatcttctgctgtattagtcagatttaaactaataaaatgagaaaagatgcattaaagtatgagaaaaattttaaaaaagataaaaaagataaagactttttgtcttcgtcagggcccaccgtgtgaccctcagaggctgtgtgttttcacagcatggcctcatgtggcctctgggtcttgcaggaggaagggcccactgagggctgctcccagggtggaggggtctctttcttgttcccccttgagtgaccttcagcctcccctggacacaacccaaacagtaaaaaaggaggttccacttgggcagaaaggacaagaataaaactcccactttagtttccctgctccacgcagtgaaaaaaagcacaatagaaaacgtgtgtatcaaaaactcaccatttgggcaactaatttttaagatttataatatggatgacattttaaccagaaataaatactcgagaaaattggtcaccaagagtctggaatcactcgtcgaggctaccagtgaggacttgcttcagtgtttgtgctctgtctttaggactaagcgaaagtcccgagaaacaaaactctgacatgaacgaactggtagacatccaatgttgggtccagcagctgtatttctgttgcaatttcagggccatggttgttcttggctcttggaaagtctcgaatttctgtggcatccttgttggatgttcttatgccaacaacaagccaataaacaacagcagagcagtcagaagccaggaatcagattcgtatccaagatgatgactcccccagagcttggtggggggtgtgtgtgtgtgtgtgtgtgtgtgtgtgtgtgtgtgtgaaaacatagcctattcacggatttctaattgatttaataatttagttcttccagagcaacccacataacaaaccacagctccagggtggtggcccagggtctgagcagtatgtttgctgcaatgaggtaattctgaatccacagagaacatgattgtttctcagtaaatttgtgacttgcaatcctagtctattttactgttataagttgatgccgtttgctaagtcaaatgtgccacattcgtgacaattactgtagtctgcgaggaaagctttctgttccataacaactaaacctagttccacccagccaatcccaggcgggagaagtatgtctggtctgctggggctgcctggcctggggtgctaatggcaccgaggcactaagtggctaggggtagaagcagcagacactaccctacaatttcacagcctctagaaagcaagtgactcctcccgagaagagagggaggaggcatggggcactacgcctgtcctcaaagccagggcctgggggtcactctggacaaaggaagagagaggacagcaagattcatggggcctctctgatgccagggtgaccccagaacacaccagaaccaaaaacaaacaaacaaaaacacagagacaaggctaaaccaccaccttctatctcaggagatgagccttacaccaaaataagaagttattgtgtaattgaaagtcaatcaatgcaattcattatattaacaccccaatgaagacaaaaatatgctgatgcttacatatgtaaaaaaacgtttgacagaattcaacatctatttatcatagagacttccagaaaactagaaaaagaagggaacttcctcaacctgaaaaagggcatctgtgaaaaacccacagctaacatcacatacttagcagtgacagactgacggcttttcccttaagactgggaaaaaggcaaggatgtccattcttgccacccctgttcaacatttcactgcaagtgctagccagtgcaaaaaggcaagaaaaagaaatgaaatttctttttgtccatattggaaagaaagaaataaagcagttatatttgcaggcaacaa[132 bp omitted]aactccgtctctactaaaaatacaaaaaattagccgggagtggtggcagacacctgtagtcccagctactcgggaggctgagg[131 bp omitted]attacaggatacaagataaagagccaaaaatcaaccattttttaaatcctagaaatgaacagttggaaacagaaatttaaagatcaatgccaagaaaacccacaatgccatttacaatagctctccaaacatgaaatactttgatataaatctaacaaaacatgtacagaattttgtataagttacaaaatgctgatgaaagaagatctaaacaaatggagaaaacgtaccatgttcatggattggaagccttaacatagtaaagatgggaattctccccaagttggttcagtgcaaattagtcaaaatctcagtagcatttctttgtagatatagataaattgatctaaacttatacagaaactttgagtttatataaatagtcaacgcaatactgaagaataaagtgggaggaaccatcctcttcaattttagacttactataaagctatagtaattaagactatgctacttgtaaagggataggcagacagaccaatgggatggaataggacactctgaaataaacccacacacatatggccaactgatttttgacaaaggtgttaaagcaatccaatggagaaagggtagtctttttaacaaatgaggctagaacaacacattgtttcataagcaaaaaaaaatgaacctcaacttaaaccttacattatacaaatgtt[144 bp omitted]taaaaccctgtctgtactgaaaacacaaaaactagccgggtgtggtggtacacacctgtaattccagctactcgggaggctgaggcaggagaatcgcttgaacccgggaggtggaggttgcagtgagccaagatggtgccactgcactccagcctgagtcacagagcaagactccgtctcagaaaaaaaaaaaaaaaaaaaaaaaacccaaaacaaaagtaaaactataaaacttttcaaagaaaacaggagaaaatcttcataatgtgcaaataggcaaagagttcttagacatgacattgaaagcatgagccacagaagaaaaattgataagttggatttcatcaaaattaaaattttttttttctctgcaaaggacactttttagagaatgaaaagacacactaaagactggggaaaatatttgcaagtcacatatctgacaggagacttgtatccagaatacataaagaattctcaaaactcaaccataagaaaacaaccaacctagttaaaaaagaagcaaatgacttgaagtgacacctgaccagagcatctacactcacatgaaaagctgctaccatcattagctataaagaaaatgcaagttgcaaccacaatgaggtaccaccacacatctattagaatggccaaaaccaagagcaccagcagcatcaaatgctgctgacggagaggagcaagaggaactcttgtatgttgctggtgggaatgcaaaatggtgcaaccacttgggaaactggtggtttctgataaagttaaacatacactttctgtatgagccagcagcaattccacttgtaggtatatatccaaaagaaagaaaacatatgtccttacaaaagcctgcatgtgaaacttagagcttctttattcataatcaccccaaactggaaaccatccaaatggccctcaactagtgaatgaataaacaaactgtagtgtaatagaatattactcagtaacaaaaaaaagcaactcggattcatgcagcaacttgactgaatctcaaaggcaccagaatgagtaaaagaagcctgtctgaaaaggtcacaatctgtacgattccatttatacaccacgctagtaaagatgaaactacagcaatagggaacagatcagcagttgccaagggctggggatgggggaggttgtgactgccaagaaataccacgagggggttttcagggcaatgcactgttctgtgacctgattatacacaaatctacccatgtcaaaactcacaaggctgtacaccaaaaagttgattttactttgtgttaatttaagaaggaaaataaatgaaaagtaaacacgggtaatcgagttttaaatgtagagactctggaaaagcagataagtcgttattttgcatcggggcatggcagcgagaactcggcagaggctgcagggaaacttcccctgcttgattcagtccaggtgtctcatggatggattgatccacgcctctaaaagcttgatagtaacaacgataacaataataagagcaaaggaggctgcagcatccaccagtggagagatgcttgactcattcccttttcacaacagcccatgacgcatggcttgtcctcctctttataccaatggccaactgaagttcaaagaactctgcaggcctgcctatggttgcgtggcccgtctgaggctggcccgactccatcgtggggccgcctgggcccagagcagacgacagcccctccgggcctccggctgcctcttactcaccatccctgctgccgctgcttcgagaatactcatggcctaccctgctggtcccaagagcctcctacataccgtggcgggcgatgagcgggaggtgtgggccagggagtgtctggtgctgtccatccccccgtggatgagataggctcccgcgctggagacgatggggctccccccgacatccatggtgatgcccaccatgctgtgggaggggaccgctggcggggacgaggctgccacggtcacctgggcaccgcctggggcctcgaagtaagaagccgtgctgctgggggcgtacatctgaggctcggggttgtaggtgtaggctgttcgtctgttagaaagagagaagtcacgcatgggacgctgtcccatttaaatgccttgtctgagttcacagatatccagccaaacatcacgtaaaagctgcaacccagagaggccagacatatggagcaattcggacgtggcatatgacactcaaatgcagcgcaagttcacagccaccatgttgcaaaatctttaggacc[137 bp omitted]catagagagaaccatctctacaaaaaataaaagatttagccaggtgtggtggtgcgtgccggtagtcccagctactcaggaggctgaggtgggaggactgcttgagcccaggactttgaggttacagtgagctgtgactgcaccattgcactttagcctgggcaacagagcaagaccctatctcttaaaaaaaataaatacaaataaaacttaaaattgtaagtggataaatgggtcacatgagggagctcctgtgtggagatggagcagttctgtatcttgatggtggtattgttacacaaatctacacatgggctaaaaatgcaaagaaatagacacgcacgcacatgcaagggtacacacatgaacatgcaaagccacatgtactccacatgcaagcacacacgcaaaagcacgtgcatacagactggtagaactgaataaggcctgtgggctagttaacagttttaccccaatgtcaatttccaggggtttttttgttttgtttttttgagacagggtctccttctgtagcccagacttgagtgcagtggcaaaatcatagctcactgcagcctcagcctcctgagctcaagtgatcctcctgcttcagcctctgaatatgggtgtgcaccgccacagtagctggggtgatgggtgtgcaccgccacagtggctggggttagaatcatacaactccaccaatcacaaccctgaagtcacagccaggttctcatgtacagcccctgcacttgtgaggggagccatccaggccaaatggaaacagacaagcaggcgaaaggactcacgtctaaagtaaagtgagctgcacgggagatgcatactttcctaccccaagcatcacacagttacagagcagaaaactctagacatccttgcaacatggaaaatcaagttctatcaacattatacaaagctggagtttaacagaggcgaggggaaaacacacaggggtggatggtttctggatctcaaagactgagacttcagaatgaagagttaggattagcctttttttttttttttccaagactatcttttctaaaagtaaaaagtacaaaagtctgtgatttctgaaatctccacagggttatgatgtcctaatccctcagctcccaccccgctccttttttttttggacagggtgttgctccatcagtcaggcgtgatcatagctcactgcagcctccaactcctgggctcatgcgatcctcccaccttggcctcctgattacctgggagggactctaggcacttgtcaccatgtctggctaattttaaaattttttgtagagatattgcccagtttcctaatagcattttaacagtatttagtgaacacatcgccaaaagcataagggagaggaatttgcttgatgcctccccaggtggcaaaggctggagtcagggagagggttccgggtgtggcccgcgggagaagcacgcacatggctccattggtgtagacggcgtctcccccttccacgtactgcacctgggcaggatacacgtgctgcaccggctgcacctgaaacatcggatacgctgcgttaccgccagtcacgccctcgtgagttgcctgcagattattcaagctagacgtgtcttctattgcctttatgaacatttagtaccaaatgacaatgttcccgcccacagtcggcacgcctagaaagacactgaggagacagtaatgtacagacgacatattccaaacgggcccacacagttcagggagctgcgactgatccccagagctctgctagcgtgtctgtgcgccctggctcctctgtatacgtgggggcgggaccaggagaatgacaacgctcctccagtgcagtggaaactagagttgtggacagaggcccagccttggctcacaggactgtccctggtttctgttttttttttttgtttgtttgtttgtttttttgcgacagggtctccctctgtagctcaagctggcgtgcaggctgcagtgcacagggggctgagcagattagactctacatggccccaacaccccccgtgggtggccctggtgccccttccctggcagagaggaggggagagaatgtgatggtctgaacagagtgggaaggagcggcatgcctggagagatggggcaatggggggaccccagcacacccccgctgccctgccctcccctctctgaaacatcagttcagagcctcggctgacaggccccgagggactctagtccgagcagtggaagccaaacgctttgcacatgggacttcaaactctcaccccagagggcatcttagtggctgtctacatccactgaattttggggtgagaagatggagggccacagaagtgggcttgttcgggtgtcatggtgtcatggtgaccttcctcttgtgcttgaagctgcaggatggggctgacctgcccctccttggaccactgagcatggtatgcacttgtccaacgcaccacccccagaatcacaagttccaggggttaacatctgttgggtgatgccccaggggtggaagtcaaatgtcgaattctggggtccaagtgaaatgcagaagttacagaaagagctggggcaggcccagcaccagaaaagtggtggaagcttctggaatctcctctccttggtgtctctggggagtgccttgacagacagcagctaagacagagccactggcctgaggccctgcgtccccgctgggcctgtctggagccttttccttcctgtgatcctgcaaaccttcctagttctcatggacacagtcacctgacaaatgcctgtgaacagactgccaatctaggcaggaccctcctgaagagcggtgcattctctagggcctcagggctccttttagggaggagcctgagttaactttaattcaggattctgcagggcacagttggcaaactccggccctgagggccaaatctggcccactgcctgtttttgtaaataaagttttattggcacacagccacacccatttggttgcatatcatttatggctgcttttgcgatacaatggcagaattgagtggttgttccagagactgcctggaccacaaacccccaaaaatgtataatttggccttttctggaaacagtttgctaaccatgcttctagagtgtccccaagctgatgatctgtgttgctacttggctggtcagccgtgctttcaaactttgttcttagataattgaaatcataagaagcatttcctctgttgtgcccgcatctgagggtatggcactcactagcagatggttcctccagtccagagccctttgtttctgtctgcatttctacctgagctccacccagcaggtgcggggtgctcactggttccccaaatgcttgctgaatttctgaatgaacgaaagatcaccagctttcttggctttctgcaaaactatctgcagtaaatgatttttttaaaattgcacagcttctggaaaagtcttttggctaagaaactgaagcttacaacaaggaacagcagccacagaaaaggatgcatccttcagagattgttctggattgctgagtgctaactgcgccccggtttgcacggtgctgcggtgcttgtcattacctgctggggtacctgctgaactctggggagggagatcggctgcatctgggcccctttgggattggagctggctgcctggaccaacaccctctaaaagggaagggagagaaggccagttagacttgtcagaggtcagtgctgaggatacacacagaatgtaagatgctgtttgtctgttcatgtgctttttattaaaacataggcaggactgatcagaggcgacggcggggtgatggtcagacttgcacactcacaccgacctgggcagacacacggcaggtacgtgcaggcacacaaacaatgcacatacatacacaagtgtgcacatacactcagcccatgcaccacacatatgcacgaattgtgggcacacacacacgtatgcacacacacatacacggaagcacatgcaccttcacccgcccaggcagctttgcctctgtgggtctgtagtctgcagcaaggtgacactgatcgtccctagtacagaggggactgctggggccctctggatagccatccgcaccactgcgtgggagagcactctgtggcgcccctcgcttctgcagtataacccggacttgtttccattttctgatgaggttaatgaagccagagggctcaagtgctgcctctggctacagaatactcgagtccaggtgccctgtgtctgggtccctcgctctctgaccccactgctctccagcctcctaagtcaaatctgcacagtgtggctttgctatttttctgggagtaccgattggccacacaaagctatcaaaatgggaagggtcaaagtgaactcgagtcgagggaggaacaggagtgttttgtgtgtttattgagagctggggctttcggagtcattggctgcagtgctgtgatttcccggcatgaaccctgaatgtcacaggtagcagtgactgccatatatacatcacgaggggtgatgggtgaggacacgccatcccctgtgttgcaggagtggagctaaggatgaagatggtgctaataaggatgccagcgcaagggcattctgattccaggtgagctgggcgccgtgtgcttggagaattcacagggtcctggcaagtcctcagagagggaccacagtgatgaaacctgggacacacatggtggccgtgagtggcactgagacctgtccatggtggctgctgcagaggaaggcagagtccacctaggcctgggagagcctgagagaggggcttggcaggaagacctgagggctgactcctcttggacaatttcaagtgggcacggaaacatatcaattaggccacaactgctggcagggcgacggcgtctgatcctcacctcagatgggcttccaagacgccctccccactgccatatgtgcaagaaataaaagctaaagatgtctgaccatacacactacatcaaataaaccgcttcactgtctgcctttttgtttttgcggaattgtgtttttttgtttttgtttttttgtgttttttgggacggatttttgctcttgtcgcccaggctgaagtgcgatggcacgatctcggctcactataacctctgcctcctgggttcaagcgattctcctgcctcagcttcccgagtagctgggattacaagcatgtgccacaatgctcggctaatttattattattattattttttgtatttagtagacacagggtttcaccatgttactcagactggtctcaaactcctgacctcaggtgatccacccaccttggcctcccaaagtgctgggattacaggcatgtgccaccatgcctggccctgaattgtgtgttttaaaaccataatcatttctttttgctgtgctcctaacttttagattccagatcgaggtggtcacacggccacagtggacctctgcacactgtgatgagcctccagcctgtttcatgtggccggtgccattcgctttgtatttctgtcttctttatggcttatttcattccacggtagaaatccaggagcagagaaagcctgaatgtgaaaattctctctctgcgaattttaaagaatatgttcattcaggtgctaga[137 bp omitted]catggtgaaacctcgtctctactaaaaatacaaaaattagccgggcgtggtagtacacgcctgtaatccc[137 bp omitted]gccttttttttttttttttttttttttttgtcacttaggttggagagcagtggtatgattacagctcactgcagcctcaaaccactgggctcaagcaatccttccaccatagcctcctgagtagctgggaccacaggacgtgcaccactatgcctggctaaattttttattttttatttcttaaagacaaggtctctgtcacccaggctggagtgtagtgtcacaatcatggcttactgcagcctcaacctcccaggctcaggtgatcctcccatctcagcctcctaaggaactgggactacaggtgcagcccaccacgcttggctaattttttttttttttttttagagaaagggtctggctatgttgcctaggttggtctcaaactcctggcctcaagtaatctgccagtctcagtctcccaaagtgctgggattacctgtgtgagccactgcacccggccttacttcttaattcttaataaagcatttctgtgtaaaagggtcatttccaagtacaagaaaacctccactgaaagctaagaagagatcaagtcagatttgggagagtggtttcttttccattcatgtcattgtttccttgatgggatctttttaacaaatattgaaaaagccaaatacagttaaggaaattgtgcctatttcaacagcagcagcactgggactgagaagtccattcagaaaaatacagattcctctctttgcagatctgagcagctttcaaacccatagagatcgcgtccacactgtggccaccctgttgttgctgagaggcgcgcgttacctgcggggaggctggcacaggcggggctgccgccgagggacgcagagccacggacgctggcgaatccgctccaccctcggaattctgcatgctcaggtctaaagaaaggcggagagagattgggtgggcaagggctgcaagcactgaaatccgaagaggcaactaacaagttcaagggagggaaggagtaaccagctacattcttcaaagtcgaaaggcagagaccctggtggtactgcctaagtgaggagctgcggaaacaggctgcacaactgtcccacagaaggagagaggggccagagaaagttttccaaatataaaacccaaaaagggctctgtcagcgcacaatggcaggaattcctcaacagaaggccgggacactggctctgtgcccaagtctgagcaggttgaactattttgaagggctcaattgtttcctcatttacccagaaatcaaaagctctgggtgggtgactgccatttgggaagctactgcaccccaaacgacaacgggagaaactctaaggctgggtttccccactgtggcaccgttgacatttgagctggatacttctttgctgttggaggcccattctgggcacggcagggtgctgagcagcacccctggcctccacccattccatgccaggagcgccccctccccaagctgtggcaatcacaaatgtgttcagatattgccaagtgacccctggagggcagtgtgagaaccactggctagggagagaaaaggtgacctgcagagggagcaaagaaacagtacattttatcctgggctggataaaagtcctcacgaattttggcagtaagtaaaaactgccttctgttcaaagccatctttgcccacaagaaagtataaacatatatttctttgctgtcagaggcatacatctttcaaataggtagttttacaattctatataaaaccactcatttaatatcgtggcagatgatacaaatttgttccatgaaaatgctaaaagtcgaacagtcttcacttttaaataaacaatcggctatgttgagcatttgagacatagttaagtacacacacttaggtagggaggtggctttgtgatcaggcacaccagtcccccgtcctggcaccagctttgagcatgtcaccctcccagtgtggggtctccatggctcctgcctgctgggggtggtgaggactgaacctcagacatacatcgcggtgcccacgacatcgtcagaacacaatagacatttgctagaacttttacgtttctctatcacccccagaggttttatctcttataatgagtgaaaaaaattttaagctttttaaaaatgaaaagtcaaacttacaataaattaatttacctaaggaaagcagaaagggatatgtgtgtttgaattcgagtgtgctggattaatcccatctgtattgttggggactattccccgaccaccaccgctccccggcccccgcccccgtcccctcccaaacgccttcgatgccacccagagccccacggccagtgcctggggatttttctgttctgtgtgagcctgactcacttctcaccactagatggccccagagccacacggtgattggctggggcgttaactaaaccttacacagcccgcacctcctaccttctactctttcaaaagattgtaaatttcccatagtgtatttcctgagtcctcaactcactctctgtctttgacagaactgacctttggaatttttctgttacaagctgcttgtatttacagtttcctttaaatgtttaaatcagtcatttgcacaccatccaccatgctgttcccgtctgaagccaagcgggtagcatcagtgatactaggagataatttgactagaactctttgtgaaaggagtccaccagtgataaagtcagaatgctgacttgactaagaccagttccttgttccgcaggtggaaataattttgctccaaactccagaccttatttaagtaagaagaggccatgagagtgttggggataaatggcgagaccgtggtctgtccaccatggccagaatgcaccttccagaaagcaagttgttccacatcacaggcatttacacatgaatgtgttcccctaatttatttttattaattattattattgttttttgagacgaagtcttgctctgtcacccaggctggagtgcaatggcatgatcttggctctgcctcctgggttcaagtgattctcccacctcagtcccctgaatagacgagattacaggcacccaccatcatgcctggctaatttttgtatttttatagaaacggggcttcaccatgttggtcaggctggtctcaaactcctggcctcatgtgatctgcctgcctcagcctcccaaagtgctgggattacaggcataagccaccgtgcccagcctgttcccctaatttaacacactatttaccatgtgttgtcttataggtcagaccaatgagtctgtggctttttgcctgtgggcatgccccagtccacaaatgcttgggtgccagaaagcatcagcctcgttatcctgaagggtcagaggacagagttctgaatgctggggtgtggagattctggaagagagagagccacagaaggggtgagccctcaaatcttcctacaaaatacacctgaatctttggctaagcaactacaccacaaaggtgtgggggagataccaggggtcttggggaaaaaccagcagtgcaaagataaaaaaattaagtgaagatttcagctgctgcctgttgcaggagggagagtttgaatctagccaagtcacttgccttcaggggaactcagatgaacctacagattctacaatacatcattaatgatgtccaggacccagtaaaaaccatgagctatgaaaagaaacaggaaagtgtaacatacactcaaaagaaagagtaacaaataaaaagaaaaaagaaaagcagttaattataaccaaacgcaagataacccagatgatacagatagcattcaaggactaaagcagctactaaaaataacttcaagaacttaaaggaagttatatacataatgaatgaacatatgggaatctcaatcaagaaacaaagtataaaaggagaaccaaatagaaattctagagcaataactgaaacaaaaacttaactggatgcactcaacagctggttaaagataatggaaagagttagtgaacttaacaatagataaaaagcatttacccaatctgaagaatgaagagaaaatatatgaagaaacatgaatagaacaaactgtctaatatatatgtaacgagagtcccagaagagaaaaagagaatgtaagagaaaaaaatattgaaaaatggccaaacacctctacattgggtgatggatatcaacttagaggtccaaaaatctcaacaaaccctaaaaagaatacaaagaaagccaagataggtatgtcatggttaaactgttaaaagaagcagtcagagaaaaactacatattatattcggagaacaagggcacagatgatgactggcttctcatcaataacaatggcaaccagaagacaatggagtgacatttttaatatgctgggggggaaaaccctatcagcccagaattctatctccagcaaaactattcttaaaaactgaaggtggaataaagacattttttgcataaacaaaacctgataaaattttctgcctaccatgagaaatgctaatggaagttcttcagaatgaaaggaattaataccagatggtaaatttggatctattaggagtaaatatcacttaaaatgataaatacgcaggtaattataaaaaaccgtatttttatatattttatatttttccttttcttctcttaatttattttaaatacataaaactatttaacaaaaactttataacactccattgtggggtttatatcatatgtagatgttctccatgacagttgtaacacagaggatggggacaaattaagttatacattcaaggttcttttattttacctaaagtagtaacatgttaactctataaattgtgataaattaacaatgcacattgtaacctctgaagcatccactaaccaaaaaaatatatatacaaaaaggtatagctaaaaagctaatagagaaatcaaatgaaatcctacttaacatatttgattatctaaataaaggcaagaaataaagaacagagaaacaaacaaacaaacagatggcacaaatagaaagcaaatggcagaattgctttgctaaatctagacatattaataatatattaagtgtaaatagactaaattcttgaatgaaaaggcagaaatgatcagcctggataacaatcaagatcccattatatggtccctaaaagaaaccctccttaaaaataaaggcacacataggttgaaagtaatagaataaaaagagatccactgtgcaaactctgatcttttatttttatttatttatttttttgagatggagtctcgctctgttgcccaggctggagtgcagtgccacagtctcagctcactgcaagctccacctcccaggttcacgccattctcctgcctcag[208 bp omitted]ggctgtaataatcagacaaaatagactctgagatgagaaatattactagcaatactagagacattgacaagacaaggaatattactgcagataaaatttcatcataagatgatcaatttatcagtatgacatattgattacagatatgtatgtacctagtaatacagcttcaagatacgtaaagtaaaaattaacaaaactaaaggaggaaataaacaatcataatcggagattttaaacatccttcattcagtaattttgattactgaatcaaaattagaagaactaagcagaaatattactaaggatacagaatatctgaattatattatcaaccacattgatgtaattgacatttagagaacactacaatcaaaacctgcacattcttttcaaatgcacatggaatattcactgtgatgggtcatgttctgggccataaaataagcctcaatacatttcaaaataccataattatacagagcatgtatgcactttgaccacagtggagtaaattagaaatcagtaagaaggttagaaaaatgccaaatatttagaaaacttaaaatacaccttcaaaataatccatgggtcaaataataaaccccaaagaaaaatagaaaatattttgaactgaattataatgtaaacactttgtatcaaaatttgtgggcactggtacaaatattgtgggtgaaaaaaagaagtaaaattattaagaaaaaaaagtgggcacacctaaagcagtgcttagaaagagatgtttagctttatatgcttatgttagaaagatttaagaacgttttcaaccttaaaaagctatatagaaagacaaacaaactaaacttaatagaaagaaggaaaaacaataaagaacaaaattaatgaaattagaaactccacaaacaatggagaaaatgaacaaaagcaatatttcttcaaaactgaaattttttcagaagaagaaaggagctatcaagccatgaaaagacatggaagaaatttaaacacatactatgaagtgaaagaagccagtctgaaaaggctacatactgtatgattctaattaaacaacattttggaaaaggcaaaactatgaagacaatgaaaagatcagtggttgccaggtatcagagagagggatgagtaggcaaagcacagaggatttttaggacactggaactgttctgtatggcactataatggtggacacatgtcattatacatttgtccaaaccatagaatgtacaacaccaacagtgaactctcgaggaaactatggactttgggtgaaaatgctgtgttaatgcagatttcatcaactgtaacaaatgtacaactctggtgggtgatggtgataatgagggaagctgtgcatgtgtggaggtatggggtatatgggaaatctctgtattttcctgtcaattttgctgtgaac[132 bp omitted]gtgaaactctgtctctactaaaaacacaaaaatgagccatgtgtaatggcgggcacctgtaattccagctactcaggaggctgaggtgggagaattgcttgaaccaaggaggcagaggttgcagtgagctgagattgcactactgcactccagcctgggtgacagagcaagactctatctcaaaaaaaaaaaaaaaaaaaaagcaagtatttaaaaaaagttaattaacaacttctcctggaaagactgataagaaaagaaaacccaaattgccaatatcaggaatgaaatgaaatatatcactagagattctacagaaatcaaaatgataatagagaactattacaaacaactttagcccataaattcaataacatataaaatgaacacttttttaaaaacacaacataacaaaactgacacagatgaaataaaaaaatgtgaatgtaatacatataacaaaaaaattgaatatgttattggaaacttccctacacagaaaacttcaggcacatatagttttactggtgaatgctatcaaatactgaaaaaggaattattacacaaatgccatcagaaaataaaaaaagaatacttcacaactcattttatgaggtcagtaaaccctgacaccaaaacttaacaaatatattacaaggaaagtgtttagactaatatctcttatgcacatatatgcaaaaataatttaaaatattaataaatcaaattcaacaatatataaataatataacccacacttagattatcaattgatttttttttctaatggagcctcagctcttttcttcctcaactggattttcacaaaggtgtcaaggcaattcaacagagaaagaagtcttttaaacaaatggtgatggatcaacagaatatccatattggggaaaataaatgaaccttgacccctacctcacaccatacataaaaatgatttcaagttagaacatgaacttacttacacacaaaagctaaaactataagacttctcagagagaacataggaggttagacaaaggtttcttagaatgcacaaatcagcataaaagaaaaacttgagaaattagatttcaccaaaatttaaaacctctgctcattaaaagattttgctaagaatatgaataggtaagccacagcctgggagaaatatttgcaaaacatgtatctcataaagggctttgatcctaatatatctacatctatatctatatatataaactcctacaattcaatataagatgacaaataacttaaaaaaatggtacttcacaaagcaagatatacagatgcccaaaagtacatgaatagtggtcagcctcattagtcactagggaaatgcaaattcaaactatatcaagatatcactaaatactcactagaatggctaaacctgacaagtctgacaacatccaatgttgtaagtacatggagcaactaaaactctcacacacccccatgtgtagatatgaatgatatgaccacactggaaagaggtttggcagttttctagaaagttaaacctgccctttaacccagaattcctcttgtagtttttatccaagagacatgaagacatatctcttcaaaaaaataataacaacttgtataagcatgttcatagcagctttttgtttgttggtttttgttttttgtttttgagacagggtctccctcaggataaagtacagtggcacaatcacagctcactgcatcctcaacctcccaggctcaagcgattctcccacttcagcctcctaagtagctgggactacaggcacgcagcaccatacccggctaatttttgtattttgggtagagacagggtttcaccatgttgcccaggctggtctcaaactcctgggctcaaatgatctgcccacctcagccttattcatagcagtttgattcagtcaccaaaaagtaaaaataacccaaatgttcctcatcaggagagtggacgagaaattgcagattatgatgatttaaagattcatattgaaaaccctaaaacaaccactaaaaatggaaaagaagagcatagctaaaaagctaatagaggaatactactggaatactcttcatgaatagaaaggaattaattactgaaattcacaatgcatggatgaatctcaaaatcattacgctgagtgaaagaagttgagtccaaaagagtagatgagtagagtggattaaaactaaagttaaaaaaaaatcataatagtgggtgggggggcaggtggcggtgggcgagagtgactggaaagggacaggaggggacactccagtgagatggacgcattctgtatgataatacagtgtgcggttacatggagtcgtgatttgtcaaaattagccagctaaggtttgtgcacttactgtatgtgaattttaacaatgacaacgaagcctgtaaaaatacaagggtggagaggaggacggagagtgggtacaggtatccaggtgttataagaatggcaggaccctgacaccctgtagagggtggtggcttcataagtttcattgcattgtgtatttactttgtggatgtttgaaatttccatgataaggagttaaacaaacacacacacaagacaccagcgatgagcaggagtggctcatgatcctggcggtgcttccaggtaagcgcagtagctcacatggtcctcccagaaggggtgatgctggatcctgagtaactcctccacctggcagaggagagcgcagcagagagtgggcagagggcagggccccgagggcgtgggtgtactcaaggtaaagtccacagggcacagggacgcacactgtggagcacctttgcagcacccagtttgggaacccctcaatccagtgcaagacagtagatgtgagtgagtggaggccatgcttcttctctgaacctgaatctgctgtgggaacttggacccattcagtgactgccctgccgtccttgctttctcgcgttcctttgtcctctcttctgtttttcttcctgtggcgaggacctgggcagtcttactttgactgccttcccctgtgtcctcttagactgggttacaggagcctcggaacagccaatataaaggggaggggccgcaacacgacctgtcacccagcctggccctgcctggccaacgggcttggctggcccaaagctccctccctcgtgcctcagaaatatgcccggagtgctgtttataagctgagcacgtttcatttaccatctggtccaagatcagggcgggcatgaaataaaggggaaaagcacagaaccagcggcgcaatttcccctccttggccggcaccagcctttggaatccacgaaacgctcatttgaccttgaacgaacattcaagtgaaccagatgcgcacttgaccttttggagccactgctgagtcaaacgcgccagtgggaacatctcccgtggcttcctgacttcatgtgagggggcacaggagagacgcagctagaagcagccctggactacggccgtgatgaatgaatctgcctgggcacaaagggaagaggcttctgtttacagaaaaatactcccatcacctagtaaccagcaatgtcaggaaaggaaatgcagaaaacgctgagagcaatttctgggcccgttcctggctgagccgctgactcactgcgaccttaagcaatctctcttctattcctgttcctccatatgccaaatggagctgtcacctgcctcacatagttcagatcagtatttagacaatgttttgtcatctttggtgataattggggcagagttagctgagtggttttagttaccttcattctgattggctgatgagcctcggtgtttgggaggcacgtggcctcctccggccatcagctcctcctctcctggtactcgctggcctccagatggtaccagagttcatctgccctaagaaagcaattaatttcctccctctgaacaagaaggaacaagcccggagtgctctcaggagtaccagttgcttcaaagcccagattctgtcctggtagcttgtcttaacactcccagtgtcattaggctgcccagaaaagtcttgtccgtttccttctcccggctcccctctgagggccaggtcctcggagtaagtgatgcgtgttttaagattctgtcctcactgttcaggcttgtgtggcctggccccacgcacagggaggacacctccaagccatctccttgccgaaaagtggattctcgaaccctccttgatggtggaaccatgtcctttctggcaccaggattactccctgtggacccagttggttctcagtgccaagagttattactctgccctgataatcaccaaagatgacagtgtgtgtccccacttggcactgtggacattggggacggatccatctctgggctggggccgtcctgagcactgcagggtgctgagcagcatccctggcctccgctcactccatgccaagagcacccccagttgtgacaaccacagatgttcccagacattgcccagtgtcccctggggcgcagaaggacctctgttcaaaatggatttgtgatgtctaagaaggggtctggacaaacagcccccgagtaaaacaggcctgtagacagggtgagaacaggaagatgaaaaaggagagtaggcaggatgcaaaatcatgacaattcagccaggcaaggagtgtgaaataaatgaacaggaccctctgaaggctacccacacattccagagcagcaggcttcaatgcacaccaagggcaaccatcgttccctccgtgcctaagccacgggggtgcccgtcattcctcacttttgggttttttttttttctcctcttgtagcaatgggctttcaaggactggagctggctccgagcttctctgaaatcaagtatcttcagaattcaaattcctttttcttttcgtaagaattgggcttctgttcctgttttcttctcaggagccaaactttccctcctttctctagaaaaggatcagaaccaagcccttgacaactggcctgagaaagggctgtttgcagactggaagggggatgggggagtgcagacacccagtaggcccttaagtcgcaggttctaatcttcagaggctgagagcaggctgcgctgacaaggcctcccctaagccagggacccccgtcttaacagtggaaacacccgttccttcccctttagaaacctgacttttttttttttcagacagagtcttgctctgtcacccagactagagtgcagtgatgcgatcatagttcactacagcctcgacctccctggctcaagtgaccctcccgccttagccaaccgagtagctggaactataggtgagcaccagcacgcccggctaatttttaattttttgtagagacaggggtcttg[131 bp omitted]caaactaaagtatggttacctcatctctgatgtggtctgattttaactgccatcaataatataccaaattcagggtgaattttgaattaaaaaaccaccaagtcttcatgacactttcacccagcaaatactcttttggcaggcaacctgattccactgcttctagcaataacttcaacaccacaaaacttggtttctaggaaatggaaattctccttaggttatggggtgccctaaagtccaacacattggagtgaaaggtaactggataccaagctagaggccgagcagcagctggtgctctgtcccccaggagtggatatctgtcccccaggagtggacatgagagtgtcacacacacacagacgcatgtatacactccccacgtatgcatatacacaaatatacatggacatacacatatacacaaacacacacacacaaacacatgtacatacatgtatacacaaaagtacacatgcagacacacatacatgcacacacatacaccacctgacgcaggataatatgagaagaatggccaaaaccactcagaagacacgtcattttcttactccatacatttttctattaaattgaatgttgactcctcccactagacaaaaacaacgattcttgtagtaaaaagtgatgggggggagcctgtgttcacacatccacacacatgcctttgggagaaagcctcaaagtacatttttttctctgtacttttctccttgcaagattccattctaaaattgcaactcttttgtcccccttttctgacaccgcctctgcacctcctggctctcagccatgcccctgccatgctgtctcttccacttccttctaccccacaactccttccctgtgctgacctccccccactatctcacatccagactgtctacatccagttccttgcatcttcaactcccattttcccattatctatgatggcttttgtgctccaacagcagaggcgaggagctgagacagaccccagcagaagcctaaaatatgtactctctggtcctttacaggaaaaggctgctggcccccttcctgaaggttctagagccttccgtctccctccaaggacccaccgatcaagcctgcaatctggcttctgcacaggctccattctttcagcttatagacaagctcacatcacacccatttgaggagaacatccactgccactgaaaccctgctctttatcctttatcttctcttgagatatggattcttttttatttgtaagtccagactctcaggagggagcctctgtcgtcttctctctgcattctcatgtctgcccactgttcttcttgaggtcctcacggggcagttttcgggcctcctctgaacttgtactctctgcagtgtttcgtgtcgctcctcgaagctctgtcctccctcgtgtctgggtgctgttgtcatctggtttcatttttccccctaatgataccttctcagtcccctgcactggtccctgcttgtctcccaccctcggcctccacccttgtgcccctcccctgtcacactcaatgtggacgacctcccggcaccaggactcccagcaccacccaaatcacctgactccggctcccttctccagctgcctcccagacctctctgcctgggcgcccctcaggtgcctcaacaagtccaagggaaactctccccccgccaaaattgctcctcttgcgtttcctaagccagggggctgttcaaggcactgggcatctccctgcgccccgggacacgtgtcgctggtgactcagcctgctgtctccacctgataccatctctgcctcccccttccttccgctcctgctgctactatttcagtgagcccctgcctccctatctcctacctggaaccaccacatccgcctcctaattggtctccctgcttccagcctctgccctctcccagccaattttctttcacattggggtgattcaaaagataacaatgtcttctcattccctggctcaaaaaatcctcccaagaattttcaccgcatagacagtgtgtgtgctaaatcaagggattaactaccaaggtgggggttccagaccatttcgatgtcgaaaaggtctgctgtctgtaggatcccttctttagagggttggagcctacccttcacacttacaagtctggctgatcaagaccttgtcacctgaagactgtccgtaggcaggcagagagccctgccccacagaatgcatccaaagaaacggaacatttggttcccttcctactcccggccccgcctctggatcttactggggagtcggctgcagccgggggaaaaagactttgcaacctccattatttatataaataagaacaaatgccaaggggaatgccgagtggctgggaaggaggtatgaccacccggagcagagggaggaggccaggcttcaggttcaagtcccaggcttgtcactcgcttactgactgtggcagtggccttggtttcttcatctgagaaaggggctgggagggggaagggaatgatatagctgatgtgcccaccccgagtgtggatcccagcaggtgcctgatcaatgaaatatgtcctaggcaggggcgggaggatccattgaacccaggagttcgagaccagcctgggcaacatagcgaggccccatctctacaaacaaacaaacaaacaacaacaacaacaaactgggggccggggaaggtggctgatgtctgtaattccagcactttgggaggttgaggccagaggattattgaggtcaggaatttgaggttgaagtaagctgactgcactactgcactccagcctgggagacagaggaagaccctgtctctaaaaagaataaacaagtaacaaaacaaaacaatgaaaaacaaccaaaaaaccaaactagccgaaagaaagagggacacaaccccaaggacaacagcagcggcagtagctggtggccagaccgagccccagactgcgggcaaagctggtatacgtgggggctgactgactctgaggaagccgtgaccacatcacctctgctctagacacaacacacacgcaactgaggctcagaaagggcgagccatgagctgaaggtcacaaagcaggaagaggcaggctagactggaactggctttggcttgggtttggctaagtcactcctttaggaggaggaagcacatgtttttatgactagagcctccggagccacagcttcccgacctacgtggagcttccgtctcttttctgtatataaatcgcttccccaaccccatgccaaagagaactccaaataacaacacaagcttagcttttgctttagaagtttctagaatttagttgatgctattggagctatcatgaactgatacagtccccgtggggagtgactgtatgagctcgaactggacttggacatttctccagccctctgtggttccagttgagaagtaagtgctcttcattcattctcagtaaccaggaggaaaaggtaaatcagcgtgacttagaatgatcgttccctctgtctatccccacaagcagttccctgtgcgtttaaagcagtgggtttttcagaatgtaaagatctgggggtcgctccctggccagtcgcgcatattcaatatctgctcgtcctttccctccccttccagagaccaatgtcacctgtctgtccttttctggtgcctggcccttgctggggtcacccacatcccctcccgtgagctgctgtgtctcgtatccctcctgtcctgccgctctcgctcttgctcctaggccgccttctccctcatgcatccagctacttggtttgaaactctcccctggcgcctgctctgtggggaaagccgggcttcctctgattccggatggagtgtttaaatgagatgtccacacaacccccaaggaccctctgattccaacggaattggagcctacgcctgccagacccccaggcctgagcgccagcccttcactgatcagctagcctctgcctgcaagtctaaggtctgcagaatcgagggaggccagcatggcacacagcggtccagactcgcagtgacaaggtggctgcagtgcatggagggccaccggaggctggcactggtgtctcctgcacacaacgcagggagggtgaggatggggtccatgcacctgccagggtggggatggacaagacccctccagcagggccaggcaggctgggcagccctctgtccctcaaagtccacccgcccatgacagctaagattaaagtgactgctgcgttgaagaaggagggaggcagagagacagcagccagcagctccaaaggggatcccaggcaagtgatgagcagtggggaaaccctctctccagtcagcttgtcatgtcatacaggctttcctgacctcagcaatgcggatatgaggggcaggaatacactctggggtggggccgtcctgggcaccgcagggtgctgggcagcatccctggcctccacccactccatgccaggaaaccccccgacccctgtctgacagccacaaatgtctccagacatcgcccagtgtcccctgggggcaggaccacccccatggagaaccacacgtctaaggccacacctttactccacacagcatttccagattcaccaaaccactctccgtgcttgtcccctcagattacttcatgtcatgcagctgttcacatctggcttcttggccagccagcccttcttgagaaaacaaagtctggatctatgtcatctcagcagccccctcacagatccctcaccccaaccccagaccctacgtagcacattgcctgcaaagatgctcaagacgtgttttgcaatgaacaagagaatgagcagcccgcctgctccgggctgctcacctgttctagccaccttcaccatgttggcctccagctcccgtcttcagctgagcacaggggcctgtcccaggattcttggaagcggcttcctaaggcatcatgcttttgtgttctccttctcttaccagcctttctttccctctcacgtttctctccctttctgaccatgagcagggctgcagtgcagctgctgatggtcaagatgaagatggggaatgtgccagtgaaaacctggcatgcggaggcctcacctcactcaccctctcctgtcccagcttcaaaatctttcagagcgactcatgctgccagagggtggaggagtggaccttgaaatgacaagtgacagttcctcagcagtagcatctcctgctttctcagcctggtgacctgacccggcagcacgcccactgggcacctgtgcccacctggggatggggtctcgtcctgcctgtgtgacccttcctcctgacagccatctctagagacagccagtgagggcagggcaacaggcagtgcatgttctttccacatctccatgactgattctggccaggaggaggctggctttctggatcccaccaacatcacataggggaccttttcaatctacctcctacctcccctccagtcgtgatttgattctggaatttaagaagcggagaaagagcctagttcaaattcaagaatttccatctaaaaccacagcatggagaggcccctttaaaaaccacctaacccagctctttcatcaaacagatgaagaaacttacctaaagatgttaagtggtttgcccaaattgcaaagcctgatatatgggaaaatacttccatgggaaataagaaaatgataaatttaaaaaaaattttaaatgaggctctaattcctgaaaaatgacttacttaaactggggactgggcagaaaataatattgtagaaggtagaacagcatttctttgggaggatttatctttttaagtatatagtggtcttctaccactatcctacaacaggttgcaggacaaataatgtattttaatctttgggggagtctttgtgtaagtcagaccttattcattttcattccaacaacactcgcagccattggatcctaattatcacatctaataaggctgatg[133 bp omitted]aaccccgtctctactacaaatacaaaaaaattagccgggtgcggtggcgggcgcctgtagtcccagctactcgggaggctgaggcggaagaatggcgtgaacccgggaggcggagcttcctgggcgacagaacgagactctgtctccaaaaaaaacacaaatgacattccattataagtttctgctgcaaaagaaagttgggaaatttgtttagatactttaaatagtcctaagattagctgaaatgccggtaacaaacgtgcaatgaacattttcttgggggcattcagcaacaaagtgaatcgtccttaaaaaaaatccatacaactaaagcgagtctcaccacgggaaccacaggagctgttttagtgaggggctggagtgtctgttacaggcggcacttttgcggctgttgctgcattagtcagattgcactcgagatgaatgaggaagaataaagtcttcaccaaaaacctgtcttggctaacagttctgaatttatagccctggcagtgggggcgggggctgggggcggggctgggaggaggggaagaaatgtgtcacccgctctgaatgaagttcaggggtggtgtttacctaagcaacaaacccttgtcaacaatcgctatctctggcttgccagcggaggaggtgggggagtgaggctgttttgatcaaaatccaacctgtggctgcaaagtgcccatcaacagggcactttgttagtgggaacgtgcgacctctcttaataaacataacatacacatcccactgagggccacgggtggacccaacttcttaacaggaacattgagcacatgaaaccagaaggtgctgggtccaatttccaccctcagccaaccctatctgtgaatgtctctacatgtgagccagccagggctcaactctttgctcttctgaaattcttaggcagcagaaatgaaggcatcgtgctgaaaagcgctccagaaattgcggatttatcagtgatgtacggtagtaggttggacaagtaatgattttctgaacaccaggaattagatcaaaaaagaaattccacttaagactaaaataagtctccagttgagagcagtctaggacatattcgaatggccagaagtttgtttcaatggggcctctgcgtttgtgcagcctgggagtcaacattacaatattggttctttcaagcagatcccgagtggatccatgtctgcctgttgtggcaaatcaaactcaaatttaatcagagaaaaatatatgcagatgttcaattaaaacctggagtccgcagtcttggcactgtttgcccggccctcattgtttgctaagtaacaacggttgccaggggcaacgcagtccactcccgtttccaagagcctgttgctgggcaaccgggagaatacttcccaaaccaaacaatgtcatcccggagcaaccccctctatctcacattaaccagatctaaaaaaaaccctctcaaatatgtaatctattattttcagaagccctaagagaaaggcaaataatctcttctctatagtaactgaggggaaaacagtttaccatatttgttctgaaataacaaaacccaaggaggaacaactctctctgaggtaagagggcatcacaggagggatttcaatccttcctagtactgggaggagaaagtgcccttttctccaagaggaaagaatctatttatcatcaaacaaacaatgtgggagagttcatagctgcacaagtgttttctgggcgaagtaaaatgaatcatggattaagctatttggaaaaaagtgtgaaaacagaggagttgataccaaattaaaacgacttttggaaatatcatgtacgtatggaacaagtgcaaagggaaccactgactcagcgtcagaaatgccttgtggggctttgccgggagggacttacagtatatctttgacatcactgcgccggctcttccctccctacccggagagaggaagacttttctaagaggaagccaggccacatcagatgcccccagatggcaggacacacaagggacacatatctccggaaagaggaggcacatggttgggcaatctcgacccatgaagggggaaaagaaaagggctaaactgaagctagtgcagcttttgttctgcctggagcagttcaggctgagcatggcttctctgaggctttgggaccaggagagggtgaagtggcaccaccacctttcaaggggaacacagagctctaagcagtgctcttgtttttggtgggcccagccaaggatcttaaaacattttgatagaatgagcaacatgtagctgcagcctcgatgggtcaacattttggatgataaaagcacacaatgctgatagatttgtgcatgaccaagcatacctttcaaggagctctcagcggaggtttgccctttgagacagacacagtcagtgcacagaaactgtttttttaagatatcatccaggagtcattcctagaataggaatggaatagacatgcctccctgagaagaaaggaagacagattctatactgttagaatttgaatctgtgttgcagggagatgaggaatttgaagccagactcttgggctgttaatgtatggctaagtggtgatgtggtgacaaccttgaatgctagtcctggaggtcaaatcaccagcagctggtgccatgggaggctttgcttaggggacacggctgggttctgcctggatgctgcatcccaagggaggcattgaggtgcggctgtgaggactccaaaccccatgtccagaaggatgagtaacagagatcctgtgtcattcattgatttcaataaaatatttattggatccatagcatgggcctggcattgaccagtcatcaaaacacaattccctgccctcatggagtttctattctagaccatgcgggaggataggagcatatggacagtaaacaaggtaagtgagaaaaatatgtcgtacgtcagatgacaccctatatcatatggtgacaagtaccagggggaaaaggaagcagacagaaggagtgctgggataggaaggggttgcaatttttaaagcgttgtcaaatgcttccctgggtgggctcattaaagagatgaggaaggtgtgggacggagctgtccagatatcctggggaagagcgttcctaatggagggaaaagccagtacaaaggccccgaggtgggacaatgcctggcttgaaactggagctgagtgaaccagaaggcaaggagaaaggcccacacaggccattgtaggggctctggcttttgcttggggtaaatggaagccatcacaaggtttgagcccaggaatggcctggtttgacttgcattttaaccaggcccctctggctgctgggttgagaataggggaagaaggaaaagggtgggagcagagagagcaatctggaggctaatgtgataatctgggcaagggaggggggcctggctgtgagccatggaggggcaaagccgtcagactctggataaacataggaggtagagtcagccagatctgctgacgggtcaagggtacctccaaggtttttggcaactaaaaggatgaggtcaggaaaattacccaagaaaaaggcctggagagcacttgggagttgagttctgaaggtgtaaagtgtgagaggctcctagacacccaggttgagatgctgagaaagcaggcagattacataagtctcaggctgaggggtgagctggagccatcagtgtatagagaatgcaggctggagccatcagtgtatagaatatatgaactagagccatcaatgtatagataacatagctggaaccatcagtgtgtaggggacatgacctagagccaccagtgtctagaggatgtgggctgaagccatcagtgtatagagaacatgggatggggccatcagtgtatagatgacatggctggagccatcagtgtatagagaacatgagctagagccaccagtgtatacaggatgtaggctggagtcatcagtgtataaatgacctagttaaaaccataagactatctgggctcaccaaggaagagcagagagaagaggcctagggctgagttctggggctgtctaccatttagagatcccaaagaagcaggagcctgaaaagaggccaaagaagtataagcaagtggtgtcctgagaaccaagtgactctggggctgagtggtgatcactggaatcagcaaagtggaggtcaccagtgattgtgacagaggagctccaggggaaaagtgtgtgcaaaagccacagaggttggagcaggttcaagagagccccaagtggagcagaactggagacaggaggaccagatggctcttttgaggaatttttgctagaaagataggaagaggaatggggaggcagctggaagaggaaactgagagcgggtttctgaaaatgaaagaaataatagcaggtaggacctaccaggagggaactgggataggagaaagaagggagacttgcaagtggatgttctttcatggatgggatgggatgggatgtggatgggatgggatgggatgtggataggatgggatgggatgggatgggatgggatgggatgggatgtggatgggatgggatgggatgtggatgggatgggatgggatgggatgggatgggatgtggatgggatgggatgggatgtggatgggatgggatgtgaatgggatgggatgggatgggatgggatgtggatgggatgggatgggatgggatgggatgggatgggatgggatgtggatgggatggaatgggatgtcctgcagaacacaggtgggcttggccagggctaggtgcatggatatgcatccaccagtacaggagagaagacagagtgtccaccctggaaggtgacaccaagtcatagtccttctggaggggggtcctggtccccagtcccattcttcatccatggaatccctgtgtttactcctcgccagcctcaatagctggctgctgggggcctccactctcagcagggtggacgggcttgaagccacacgatagggcctgggtataaagtatgatgacctaggtccacagacctcacatcagagcctccagcagaccctgggttcatagtcacatatgggctccatgtgaccaatacttgcccccaccccatggtcccacctcaatgcctgacagaagccccactcctcaggtttatgcacatgatttgcctttttcactgctttctttttcttttctagacacagggtcttgctctgtcacccaggctggagtacagtggttggatcatagctcactgcagcctcaaactcctgggccctcagcccagtgattgtcctgccttagcctcccatgtagctaggactacaggtgcacaccaccacgcctggctacttaaaacaaacaaacaaacaaattgtagtagcaaggtcctactatgttgtccaggctggtcctgaactcttggcctcaagcagtcttcccacctcagcctcccaaagtgtgggactgcaggcgtgagcccccgtgcctggccctcactgctttccttatggttactccatacctcttttcaaatttgccaaatggctaatctttccacactcgagtattattagaaatgagttttaatatacctatttttcttgctatgtcaacgtacaaacatgcatccttaaataagaaagtgttagagtcacatattaaaaatgcatttcttgctaagtcatgctcgaattatgcaagattgcaaggaaatttaatgcaagacaaatgagtgaggccaggaatcttgctgtgagagtttgggaagcagagctccctggctccagacaaggaatggactcagcctgacgggaggaggtctcgcctgtctttgggagggaaagatcctgtcggtacttttaagtgatcgtctatctttgaggcacagacatatctcaattggcccgggacagaaaatcaagccaagtcagagatcccctcagcaagacccagggatctctgaagaaatgaaaatgaagcgaagaaagacaaaattagaaatatttattccatccgtcatctctttgcttgtctcaaatgccaccatccaacccaatgagaacgacaaaaggacattctatttctgtccccatgaaagtttcaaccccaaagcaaaacctcagtgtgcgctgagaagatgcagcaaaagggtctttttgttaaactcattattagaattaaacccaaagagggaaatgttggaggtattttaggtttttaaactaaattagtcccaattaattctaagaagatacactaaaatcaattctgttttagaaaggcaatttaatacaaaagcttgaggggaaatgttatttttaaaatgtaaaaaggcaccttaaaacctgtaaaatattttaaatggctttcctattccatcaagttttgagaggggttttcatttttctcaggaaacattttctcccggtgtggggttggggatgacttcagacagggcctgaaagcagcgagcaactcacgctgtccaggaggggcgagaacaaaccctcagctttgtctggttctgtttttggtgtctccattcccagctccgtattaagtcagttcccaaatccgagcaaaagataattttggataaaaaaatggaatgttctaactccgcctgagagatggaaagagaaacagagatgagtctgatgaaacagaactcaaatcaccctcttcctgacccaccgcttctcttctgattcaactgtagatttggacaaattgccacctttcagacctttccatgttccaatattctttccatttgtcctggcttccagaagccttggcggcccaagtatccacctgggtgctgggtgaccctgcctgttgctgctcttggaaagcatgtttcacttctgcatacattttaaaagataaatatttgggccaggagcagtggctcatgtctgtaatcccagcgctctgagaggctgaggtgggagaattgcctgaggccaggagtttgagaacagcctgggtaacaaagcgagacctcgtctctagagaaaaaaaattaaaaattattcgggtaaggtgggtgtgcctgcggtcccagctactcaggaggctgaggcaggaggactgcttgaggccaggaggtggaggatgcagtgagcaatgattataccactgcactccagcctgggcgacagagagagatcctgtctctcaaaaaagaaacatgaagtcttccttccaaggacataacaaagaaaaaagagaaaaaaaaggcccctctctcttcagtgctgcctacggaggtggcagctgtctcctcctcagcatcatggccgccctcagacccctcgtgaagcccaagatcgtcaaaaagagaaccaaggagttcatctggcaccagtcagaccaacatgtcaaaattaagtgtaactggaggaaacccagaggtattgacaatagggtttgcagaaggttcaaggaccagatatttttttttcttttttgagacagagtctcactctgttgtgcaggctgcagtgcagtggtgcgatctcagctcactgcaacctccgccttccgggttgaagcaattctcatgcctcagcctccagagtagctgggattacaggctcccaccaccatgcctggctagtttttgtatttttattagagacggggtttcaccatgttggccaggctggtctcaaactcctgacctcaggtgatccaccctcctcagcctcccaaagtgctgggattacagacatgagccaccgcgcctgcaagggccagatcttgatgcccaacactggtcatgggagcaacaaaaaacaaagcacatgctgcccagtggcttccggaagttcctggtccccagcgtcaaggagctggaagtgctgatgtgcaacaaatctccctgtgctgagatcgctcacagtgtttcctccaagaaacaaaaccatcgtggaaagggccgcccagctgccgtcagagtcaccaaccccaatgccaggctgcgcagtgaagaaaatgagtagacggctcatgtgcatgttttgtgtttaaataaaaccataaaaactgcaaaaagatatataaaaacaaaaaataaatatttgaaatatttccatccaaatggaatttcaaaacaattaaagatggaaagaaggaaggctgaatggatgaaagccctctgaagcttactgtagagtggaacgatgaagacacagttgcatttctgtgtaagtcaaattctcttttttaccgtgcaaatttcatggttaagatgaggttgaatgcggacggctaataccagtaatttgggctaagcgctcctcttccgggagtctgagccatctgaattggctgtttacccagctcatactgatcaggaagtatctgagagggtgaatgcaccaataaaaagccacccagaccctcctctccagcaagtggaaagtgtgtgtctcgtcctcacacaggaatgactgtagaggaccacagggcgacttctaggcagcccccagacaggccggccctgggtagcaggaactcgttctgccccagctgaggttctgggcctcatcactaatgacccacagcagccaaggtcagccctcgggaagatggaaaatgaatgaagggcagctctgcccaaagcggcggaccaggtgggcaaacagagagccggggttttgtagcaggggtgggggtgcggtacaggaacagatctggagcttgtggcaggagttcaggtggaacatcaggcggggtacagatgccacagtgtggaggaagctcctcctctcatcccaagctagccccttcctaacctcaagtcaacgagaagagaaggtgggctagaacctttccaccttcctcttagcacccggcctgtgccggtgcatctcctcaccccacacagtgccctgggtacaggggctggggcttgaagggtgcccataacacactccctcagagcctggacactcagccatcgttcattcattcaacaaacacagtctgagcatctgccatgtgccggcttcaagtgctgaggacacagcagggaatgaaacagattgagtccctgaccatgtggggctgacccctcagggagagacagacgacaccatggacacagaacagcaggaggtgacaaatgctctgaagaaaaatacactcaaatgcacaagtggagtgcggcatgggccaggggcaacaaggtgacctggggcagtgacaggacagaggcagagtgaggtgaggaaagtgtcgccgctgagaaggctctgccagggatggtgctcggcaaggctgaggcacacgggacatgtggggtcacacgggtcacgtgaggaggccaccagagggagctgggggaatgctgggggttgaatgttgtgtccccttaaattcctatgctgaactcctcaccccaaggcagtagctttaggaggtggggcctttgggaggtgattaggtcatgagggtgggatcatgccctcccttatggaagggaccccagagagctctctctggcttcccaccatgtgatgtgaggacacagcaagaagacagccatctgcatcccagagggaagccctcaccagaacctgaccctgctggcaccctcttctcagacttcccacctccagggctgagagatgtgtgtctgttgtttacagccacccagtctatggccttttgctgaaacagcccaaacagattaagacaggaggagaaggaggaagaggagaaagaagaggaggagaaggtggaggaggaggaggaggaggaggagaagatggacttagagacacaaggaggccacagtggagtgtttggctttcgctctgagtgtgctgggaagctactggaaggtttagggcacagggacacaatctgacagatattttggaagtatcaacggtcaatggaagcaaacgtcagggctggacaaccaggtcagaggtgacaaagacttacgtgatagcagtgctctcatttgggagacacctgaagacagagccagccaggtttgctgacgggtttgacataaagggtgaaagaaagagaggagtcgaggctgacttaaggcttggggctggcctgagcacctagagaatggagctgcccggtgctgagctggggaagcccgtggtctggggagagacaagtgtgaggtcgaatcaggcacccagttttgggtgacagaagcctcagatgcccatcagatgacacccacatgcagctgccacctaggcagctaggtacacaagtccaggattcggggagtgagccaggctgcagacactaggacactggaggttctaagatgcatttcaactcttgtacctcggtgagatcaccaggaaagcaggtgtagataaagcagaaaagaggtcccttctcaagttcaaaggtcatgaacagttggaggatctggcataggggacagaggagaggaagaaagcagagggaatatcgagctctgaaatacacagcgtcacccctttacttggctttcggagcttggtgttcacaaaaaattagaaacgaggttgggggcggtggctcatgcctgtaatcccagcacattttgggaggccaaggtgggcagatcacttgaggtcatgagttcgagagcagcctggccaacatggcgaaaccccatctctactaaaaaataatacaaaaattagccatgcgtggtggtgcatgcctgtaatcccagctacttgggaggctgaggcaggagaatcgcctgaacccgggaggctgaggttgcagtgagccgagatggtgccactgtactccagcctgggtgacagagagagactctgtctcaaaataaataaatacataaataagaaacaaacgttcatcaactggaataccattaactaccttacggtgcatcctagctctaaaacaggaggctaggcgagggtgcctgggtccggtgcctgggtccagttcctgggtcctccagtttctagctgggtgacctcagccagggacttaaatctttctgcacttccatttctttgtccataaacggagaaaatacttctatctgtgttgggtggttgtgttaaatgagaggagtcctacaaagtgtggagtttaatggccagcccagcacacggaaaatgcccataaatgttcattagcgtcatcgttgtaattcacaccattataacgtaacccacataatttactgattttttgcagatttaaatatctgaaactaaaagcagttatgctgtttgctatttgtgatttcaaaaactcttcgctatttgtgatgttgctaagccctttagggagtgcctcctgctatgagctatattcattccagggcatatttgtggggtttgtcattttaaccaagtacttaatacttgtttctctcccagcatcttgccaaatgtggcagctctccttctagatgaacactactgcattactgttatagaaatgatattttaacatcaactcccttttcccttttcttccctagaaatccagtccttccatgagacctcggtacacacagaactcctcctaccacgtgcaaccttattctcggctgagcaactcataaatcgcataacaaaaacagtgattgatgcggactgtgtttagtgccatccttgccggtgagagggagtgagccagcaagcttccttaaatctctttagttctccaaaaggagaggccatttgccttctcatctatgccgcaagtttctggggcttgcatcattaacctggtggctttgccaattccttcgccagtgctgggtcaaagacaggcaagggcaccagggttagccatgagtgtgtgccaggggctgaatgcaaaacccgggagcactggtggctggggcaggtgggctgggctctgccactgcctcccccagcccacccaagaggggcgtgtgcctctgcaggaaatggcctccaagcatttctcaagacttacgagatgttcaaacctacacagtcagagacaaagagctagctataagtggggtctttttcccctcctcaaaattcatcctgcagaagtagacatgtgctaaacagtgcatggccacacaaatgcttggataccaatgttcacagcagcgttgtcctaatggccccaaagtagcaacagcccaaatgtttgtcaactgatggatggataaacgaaggcggccgggcgcggtggctcacacctgtaatcccagcactttgggaggctgaggcgggtggatcacctgaggtcaggagtttgagaccagcctgaccaacatggagaaaccctgtctctattaaaatacaaaattagccgggcgtggtggcacatgcctgtaatcccagctacttgggaggctgaggcaggagaatcgcttgaacccgggaggcggaggttgcagtgagccaagatcgcgccattgcactccagcctgggcaacaagagcaaaattccatctcaaaaaaaaaaaaaaaaaaaaggaacgaggcactggcacatgctgtaaacggatggacagtggaccctgaaaacattatgttacgtggaagaagccagtcacaaaaggccacatagtgtgtgattctgtttatatgaaaggttcaaaacaggcaaatccacagagacagaaagtggattcacagttgcccggggctgggaggaggaagggcaagtggctgttcatggcaggttcagggtttcttcttcttttcggagtgatgaaaatgttctgtgaagatagtatactaagacccactgaaccatacacttcaaatgggtgagctttacggtatgtaaaacagatctcagcacagctgtaaaaaaaaaaaaaaaaaaggtatattgacgacctgtccccagtggcattagtttaagtcataaaaatttagaaacaaatgttcatcaacaggaaaatcattaagtaccttatggtgcatcctagctctaaaactatgctgccattaaaaagaagaggtaccgtctccaagaaagaaagccaacatctgcagtgcctggcacacagtaggctctcaaatatttgcagaataaatttatgttgaaaaaaccccagctatacatactataaaataggtaaaggggccttaaaaagatctagaaggacacaagttatatgactaacagtgcttacctcatatgaggtgggatagacagaaagacgaaaagagaaattttcatttctgaatctcctgctgtagatggtggtccttcccaggagaatgttacttgtattacttgcatatcattttattttttgagatggaatcttgctctgtctcccaggctggggtgcagtgcacaatctcagctcactgcaacctccacctcccgggttcaaactattctagtgcctc[134 bp omitted]cggcctcccaaagtgctggaattataggcgtgagccacggcgcccggccattacttgcatatcattttaaaagttgtaattcattggtaaacattctaagacatgcaggttcctgtaaattaccaaactgtaatcctgtaaattaccaaacagaatggctgtttgtgcagggagtatcactgcgatttagtgtacttggtctagagtatgctgtcgctcttacaaccagaggttttcatgttaattcaacatccatcatgaagagaaaatataccagacaaacaaactgtggtaggatcacacaaggactgtgctccagcaataaaaggaacaaacgactgacacacgcaatgacagaatgaatcccagaggcatttatgccaagtgaatgtagccagtctcaaaagctgcacaatgtatgtttccatttatacgacattctggaaaaggcagagctatagaaagggacagcagatggtggccagaggctaagaatggggccagggtctgactacagagagaggttggacttgctctccatcctgtttgagatggaggttataagaatctgtgcaagtgggc[139 bp omitted]tggtggctcgtgcctgtagtcccagctacttgggaggccgatgcaggaaaatcacttgaaccagggagccggaggttgcagtgagctgagattgcaccattgcactccagcctggcaacaaagcaagactctgtctcaaaaaaaaaaaaaaaaaagtatgcaagtgtgaaaaaccatagaacagcaaacctaaaaaggcaaacacgactgtatgtagatttaaaatataaattaaaaaaaaaaaaagaaaaaccaggtgcatctactgagtgcccagccccattctaggctctgaggattctgtttttttagggatgggtcttgctctgttgcctaggctggagagtgcagtggcaagatcacaactcactgtagcctctaactccagggctaaagcattcctcctgcctcagcctcctgtgagtagctgggaccacaggcacatgcctggttaatgtgtgtgtgtgtgtgtgtgtgtgtgtgtgtgtgtgtatgtgagagagagacagagagagagagagagagaaggtgaggtcttgctttgttgcccaggctggtttcgaactttcagcttcaagcaatcctcccactttggcctcccaaaatgctgggattaaaacgtgagccacgacacccagcctgaggattctaaggtgagcaggtcagatgaaagtgctgctctcagggtgccagtatccttgtcaggcaagaatacacaaggttccagatacacaaggttgttcagtagagatccgggctgtggtgcaaggtgattgcagagggatagagccaggggtggtggtggagagggctcccctcttgatagccagttatgggtggcactaaggatggcactgagctgggacctgacagctgcaaagaaggggccaaccttgggaggatgtgggagagagcagcctgggcaagaggaatagctgtgcaaaggtcttgcagcagcagaggccctggacaaggtcagatgtctggagttttaaaattccaattgctgtcggggctcagtggcttatgcttgtaatcccagcattttgggaggctgaggtgggtggatcatgaagtcaggagtttgagaccagcctggccaacctggtgaaaccccatctctactaaaaatacaaaaattagctgggtgtggtgatgcacgcctgtagtcccagttacttgggaggctgaggcaggagaatcacttgaacctgggaggtgaaggttgcagtgagtcaaaatcatgccattgcataccagcctgggcaacagaacaagactccatctcaaaaaaaaaaaaaaaaaaaatccaattgctaagggaagccccaggaggctcaacccacaggcacaatataatctgacttacatcttttaaaagagcactcttcttagattatagacagaaagagtgaatgcaggaaaaccaagacaaagacattcactactttaaaaaagttcataataagtctgcttcccggccgggtatggtggctcacccctgtaatcctagcactttgggaggccaaggtgagaggattgattgaggccaaccaggccgaaaaggaagaccctgtctctattttaaacaaataaaaagaataattaattatgcttctaagacctgtctgtggaaccggggaaggaatcatatcattttataaacaaaccaagtaacactaagcccattgcatgaaggattaaataattaagcatttagttaacatgaaagtaaatgatggcttctatacatttttaatgcaggtaattatactctcagtaaatcatcacagcacacaaacattagcatgcttattaattcagtgttaattgctattggcttacatgtaccattatccaaaaattaaataatttgagtgtacactcacttttttaaacaggtacatataaaggtagatggagggctgggcgcggcggctcatgcctggaatgccagcactttcagaggtcgaggagggtggatcacctgaggtcgggagttgaagaccagcctggtcaacatggtgaaacaccgtctctactaaaaatacaaaaattggccgggcgcgttggctcacgcttgtaatcccagcactctgggaggccgaggcgggcagatcatgaggtcaggagatcaagaccatcctggttaacacagtgaaaccccatctctactaaaaaatacaaaaaattagctgggtgtactggtgggcacctgtagtcccagctactctggaggctgaggcaggagaatggcgtgaacctggaggcggagcttgcagtgagctgagatcatgccactgcactccagcactctagcctaggcgacagagtgagactccgtctcaaaaacaaaacaaaataaaacaaaaacaaaaacaaaaattatctgggtgtggtggtgcacacctgtaatcccagctactagggaggctactagggaggctgaggcaggagaatcatttgaaccaaggaggcagaggttgcagtgagctgagatcgttccattgcattccagcctgggcaacagagtaagaccctgtctcaaaaaaaaaaaaaaaaaaaatggtagacaggggaaatggaccagatgttgaatctagtttggttatagtcattgctggggattaatatagtaagaggagggtccttctctcctgaattgatgtctatcaggggttggaaagttttctttttttctttgagacagagcctttctctgtcacacaggctggagtgcagtggcgcgatcacagctcacttcatcctctaactcctgggctcaagccatcctcccaccacagcctcccgtgtagctaggaccacaggcgtgcaccaccactctcagctagtttttgtattttttgtagagatgaggttttgccatgttgcccagactggtcttgaactccagggctcatgggatccgcccactttggcctcccaaagtgttgggattacaggtgttagccactggaaaactttctataagggccagaaaatacacatttttggctttgcaggtctctgttgagactactcaactctgcctctggacagtaggaggagtgagtgtggccgctgcactcagcgcttttcagagccatgctagagcctggggcaaagaggaaaaagaagcagcagtgctgatcctgtctttatgtaaaatttcaacattttgctcatcatggaatttttttcccattatttttttgagacagggtctcattctgttgcccaggctgcagtggcacaaacacggctcgctgcagcctcaacctccctgggctcagggagtacgggcacgtgccactacccccagctaatttttgtattgtttgtagagacggggtttcaccctgttgtccaggctggtcttgaactcctggcctcaagtgatccacccgccttggcttcctagagtgctagaattacaggcatgagccactgtgcccggccttcatcatgaaattttttggcatttattttgattttttaaaatactgcattaaaacattgtgtatcttgatgactgtggatttttgtaggcactgccttaaattttgcatcccaggcgagggcctcactgcctcatgctagttctgaccctggtgctggtgctgttccaataaatctttatttatggacactgaaatttaatttcatatcattttcatgtgtcacaaaatattttgtcttgtttccaatcatttaaaaacgcaaaaaatattctcaactcgtggaaactaaaaacaaaaataaaaacccacagtagtgtgctagatgtagtctgctgacccgttttttttttttttaatttttattcatttatttatttattctgaggccgggtcttgctctgtcatccaggctggagtgcagtggtgcaaacatggctcactgcagcctccacttccagagctcaagtgatcctcctgctcagcttccccagaagctgagaccacaggtatgtgccaccatgcccgggtaattttttaattttttgtacagatggggtctcaccatcttgcccaggctgtgacccctatcttggatggcctttgggggaacatgtcttactcataattataggcagcggaaaatgcctgctagcgagtaggcactcaaacgtgtctgaataatttagtcccattttctccattcttaaattactgtttaggttgctttacattctcttcccagccccagatctccaaatacaggagatgagcacacgtgtccagggcaccccagacctcttgggcagggagaattctcggcagagaagaccggatatgggagtgtggtgtgggaatcgtctgtgagtgctaaagaaccggtcctccacctgccccaagctttccattaggctcaaaagcagagttagcccagttaagcgcatggaaactaaatgagttcgctgtgcattgttcagctatacatgaccacaggcaagataaatatttagggtctttattaaagctgtgatcctctgctttagcaggacagcgtagggacttactagaggcaaaccataaaaagcatatgcctcctagtaaagtaatgctgggaaatatgacgagtcaattactctttatcattaattgtggtaaaatgtgcataatgtacaatttaccattttaaccatgtttaatatacagttcagtagcattaagcacactcacactgttgtgcaaccatcacctccatccatctccagaacattctcatcttcccaaattgaaactttgtccccatgaaacactcactccctaccccctccccagcccctggcacccaccattctactttctgtcgctatggatctgatgactctagggacctcctaggggtggaatcacactggatttgtccttttttttctttctttctttcttttttttgagacagaatctcgctcttgttgcccaggcaggagtgcagtggtgcgatcttggctctctgcaacctctgcctcctgggttcaagtgattctcctgctgcagcctcccaagtagctgggattacaggtgcctgccaccacgcccggctaattttatatttttagtagaggctgggtttcaccatgttggccaggctggtctcaaactcctgacctcaggtgatccaccacccaccttggcctcccagagtgctgggattagaggtgtgagccactgcgcccggctggatttgtccttttgtgtctgatttctttcactgagcatgatgtccttaagcataatgcataatgtccatgttgcagcctgtgtcagaatttccttcctttttcaaggctgaatagtattccattgtatagatggatcacattttatttatccattcatttgttggtggacacttgagttgctgccacattttagctattgtaaatcatgctgctatgaacatgagtgtacaaatccctgtctgagtgtacaaatactgttttccaaagcagctacactattttgcacacctaccaacagttcacatgggttcagttccaatttttccatattcttatcaacatttttctgtctttcttcttttgggtaacagtcatcgtaatgggtgtgaagtggtatcttattagggttttgatttgcatttctgcaatgataactggtatgaagcacctttccaactgcttattggccatctgaatatcttctttgaagaaagagaaatatctactcaagtcctctgcccattaaaaaatttttttgctgagttacagaaattctttatctattttgaatattaacctcttattagaaatgatttggaaacattttcttccattccttgggttgtctttttactctgttgctactgttctttgatgcacaaaagttttgaacgctgatggcctaatccttctgtttttccttttgtcgtgagtgcttttgatgtcctatccaagaaatcattgccagatccagtgtcataaagatgtctccctatgttttctgctaagaattttacagttttagctcttatgtttaggtctttgatccatt[135 bp omitted]acatagtgagacctcgtctctataaaaaatttaaaaattagcctggcatggtggcatatgcctgtggtcccagctagttgggaggcagaagcaggaggatctcttgagcccaggaggccgaggctgcagtgagccatgattgtaccactgcactccagcctgggtgatagaacaagatcctgtctcaaaaaaaaaaaaaaaaaaaaaaaggcaggggagatccaatttcattcttttgaatgtggaaacccagttttcccagcatcatttattggaaagactgtatttaccccatcgaatgatcttggcacccttgcaggagtaaaatacggccatgagtcgcttcctgacagggatacgttctcagcaatgcaacctcaggcaatttcatcattgtgcgaatatcacagagtgatacttacagaaacctagacgctacaacctacgtagcacacctgggctgtatggtataacctattgctcccaggctacaaacctgtctagcatgtgactgcagtgaacagtgcaggcaattgtaacacagtggtaagtatttgtatctccaaacatggctaagcatagaaaaggtacaggaaaaatacagcattataatcttatgggatcacttgtatatgtggtctgctgttgacggaaatgttatgcatggcatgactgcattataagcaaataattaaagttaagtaataacacacaagaatctaatcttgccggaaagggcactgtaaaagtgaattgcaagagaagctcacaggaattagatgacttctgtgtctcccctttgacagtaatggatgcatccacgcacacggctcattcctgttttcagtgatgcgcttccttactattatttgcaaagggaatttgtctgttctgaccacacaactctacagagatacaaacatcacatgggcacctctgccttttctgtttactactaacgtagattgtcatgtaatttttgcccttccatgcctgttcttctgaggagaaattcccagtgttgagcagattttgaaagagatccagactgatgaaagattaaaaaccactgggctacagcagtatgtctttttttttttaatcttttaaaacttaaattcacaaatttgaggactccaattcagacgagcttcgttgtataaaccaggcagatctgtggtctttagaagaaagtgacagaatcagttcacttcctgggtggggactgagcacaggcagatggtcgcagcgggtcagaagccacaagctgcagagacagactcatgatagacagggcgacaggcataaccttcacaggggcgaagcgagacgcacacccgtctccagcagggagccacagtccacaggtggctactcctccctcccactgccctgtatttaggaattcaaacagcctgggaagggactgtgctgataattggctctgctttcaaagaacacttaggagataattaacccacagtccaccaagcccaggaattgaggatcgaggatcagaggaagcccaggagggagatgcctgccagaggcgagtaaagggacttagagagaagtgcagttttttctagcatccacccatccaacccaaggaagcccatctgatttaccacatctagccagtgaccttgatcagttccacagccaggcattaaggcgagtccccactaactttctcacctcagagaagcccgattccaattctagcccctccctggactctgtcagtaattcctagcaatgccttcactctaaaaaatccagctacaacaaaagattcagatgctgcagaatttattttgatttggaggtttcagctccaaatcaaagggctgatatcatggaaatagcttttttgacagctaaacagaaattattttccttgattagccatggcacattcgcccttcttaggtggacagcgtgttttgatacgaaggtgatgggttacaggtgctgggtttctccacatgggcagtttctccccaggagtctcactccttacatcatcatctagagcagtaattaatttcagaaaccactcctggctgccataagctgcacacccacttccagaactggcttaacccgccaggaagccacagtcctcaagggacagtcacccagagctgcatgttggtgagtcagagacgagaacaaagaggaagcaatgacccctgaacacagagcccttcccagcccagagtgctgctctaagcctaacccaggctggccagggcctgaaagacaaagaagaatgccacagagaagggccagggcactacagctttttttttttttttttttttttttgagacggagtttcacttttgttgcccaggctggacagcagtggcgtgatctcggctcactgcaacctccgcctcccgcgattctcctgcctcagcctcctgagtggctagtattacaggcatgtgccaccatgccccgctaattctgtatttttagtagagatggggtttctccctgttggtcagactggtctcgaactctcgacctcaggtgatccacccgcctcagcctcccaaagtgctgggattccaggcttgagtcaccatgccagcccagcatttttttttaaaggcacagttctcataggtataagaaggcaacgaaattcatcctgcaagatggatgtagccaaagactcttctttaattacaacaaactggagaagataacaaagtaaatattattcctctctctcttagagaaagcaaaaatatgttaaacaccattgaagagcctaaggggttttataaacctcaaaatcagcatcacattcatatacacatgagtactagtcacatatagccaagtaatgtgcgttagaccagggggtggcaagctttttttgtaaaatgtggaatagtaaatattttaggttttgcaggtcaagcgctcgctgtcaagatgactcaaccccatccattgtagggtgaaatgactgtggctgtgtgccaataaaactttatttatggttccagttttagtatatttgctgctgaagcaagcacaatttatggacactgaaatgtgaatttcagataattttgtatgtcctaaaatattcttcttttgatttttccaactacttaaaaatgtaggaaaaaagcattcttagttcatgggctgtacaaaaacaggcagtgagttggatttagcccatgggctagtttgcccactctgtattagactcagatgtttggactcatgtctttaaaacagagcctaaaataactccaaataaataaaagggcaggtatcaaatagcccatgtaatgacaaataaccacgctagaaatctgcgtccagcaggtcagggacactctgggggtgaagaccaacactcctgtcctgtctccatctcagtggcggaggatgtggggttttgggcagtctctgaaaagggagtgtgcacgggcaggagctggagcaatgtcacagggaagggggaggccagccctcatgtcctctggattctgaccctgtgctatggttggaatgttgtgtccccccaaaactcacatgttgaaacctaacccccaatatgacggcatctggaggtggggcctttgggagatgattaggtcatgagcatggcacccacaggaatgggattagggtccttgcaaaagaggccccagagacctcccctgccccttccatcacgtgaggacacagctagaaggcagaagccgaaccagaaagcaggccctccccagacactgaatctgccagtgccttgatcttggacttcccagcctccagagctgactgcaacacattcctgttgtttagaagccagccagtctctaatatttttgttgtagcatctgaatgaactgtcaccctcccttccctccaccaccctgtgtagctcttacatgtgctggggaccttcatgattcagggtctttgggcatttcacagaggaacagaaacttgtggattagagaaaattattatatgagataacatctttggattgtttgtataagataacatctttggattgtttgtttgtttgttttgagacaggttctcgcttttgtcactcaggctggagtacagtggcatgtacatcgctcactgcagcctcaacgtcccaggctcaagaggtcctcccacctcaccctctggagtagttgagaccagaggcccacaccaccacacctggctatttttgcattttgaatttttcatagagacagggtttcaccatgttgcccaggctggtcttgaactactgagctcaagtgatcttcctgcatcagcctcccaaagtgctgagattacaagcatgagccaccatgccagcccagataacacctttgaatacaaatttctcagccgggtgagg[131 bp omitted]aagaggctcagcatcatcagtcattacagaaacacaaataagaaccaccatgaaacaccacttcacacctacgaggctggttatactaaaaacagggaaaaataaaagtgttggtgaggatgtggagaaactggagccctcactccctgccggtgggactgtgaaaggacaatttggcagttaacttgcagttaccatacgactcagcaactccactcctaggtatattccctgaagaaatgaagctatatgtccaggcaaaagcttgtccacaaatattcatagcagcactattcgtaatagtcaaaaggtagaaacaacccaaatgcccatcaagggatgaatgcataaacagatgtggtccacccatggagtggaatactattcagccataaaaaagaatgaagctctgacacaggctacaatgtggatgaactgcaaaacaatattacccaaccttccagggcttaaatatatatttatatacacacaagtgaaagaagtcagtcacgaaaaaggtcacatattgtatgattctatttacaggaaatattcagaataggaaaacccacatagacaagaagcagacttggtgtttgccaggggctgggagtaggggactgtgatcgacttctaataggtatggagtttcttttcacggtgatggaaatgttctggaattagagagtgatgatggcttcacaacactgtgaaaatcctaaaatccaccaaatgaaaaccattttaaagtggttaaaatggtaaattttgggctgggtgtggtggcgcatgcctgtaaacccagcactttgggaggctgaggctggggattgcttgaatcccggagtttgagaccagcctgggcaacatagtgagaccttgtctctacaaaaaattagccaggcatggtggcgtgcacctatagtcccagcccagaaggtggaggctgcaataagccatgatcgcaccaccccactgcagcctgggcgacagagcaagaccctatcttcaaaaaaaaaaaaaaggtgaattgtatgtgaattttatcacaattgaaaaaagaagatgacgctgagtgctggcaaatgccagccacgaagagaaacaatgatatagagactaaaagcattcctgcattcctcacctcaggagaagtaaaatgcaatattctcataattatgagaaaattaggcacgagaacgtacaaagtacaattcgaacattttcagaaataaacttcagtaacaaacaacaatatctgttggacacgatccctaacagactgtttgtgaaaatctcgagtgatgggagagaagtaggtgtggggaaatctgtttcaggaactctgagtctaagccgcaaaacgtgtttacatgagacccatcaacagaataagccgagggactgaatgaggaatgaactgcgggaggtaggcattttacaatcaggaatctgaaatgagactatgtcccagtttgggagtcagagaattgtagactttctgggccaagccctcagtgaacattaaccctggagaataaaggagcagggagtttctagaagattctacatccgggagtggggggaggaaaactgtggaggttggtgtctcagaaatcttaaaggatgttaaaaaagaaaaccatgattcactgaatttaaaataggagaaaagctcagattaagaatgaataactttatcgaggattaggtcacaggaattctggttttaaattgtttacgtagagttaaagagaaagaatttgtaccataagaagaagccaactataacagcaaggaagacattcaagaacaggatctagtggctgcacaactgagctccctcctcgggctggagagagcaggggctcaagtccctaaacccgggccatggcagcagggggtcaatgacccaagaaagcagcttgggacggagggtggccccgcaggctgcatgctgggctgctggaaggaaggtcttccgctgagaaggcagaagaacgagtgctctgctggagaataaaggtagcagagtttacagccacgcgtccagagggaattcagaggggcggggcaggccgttgctaggctcgagtccgcgcaggagtcaagggcgacaagcatgagcttgtggctgcgcaaaccagcccagcagccaggcctccccaagaggcacacgcgagcatgggcgcagctcacggtgacagaatgaggctgagtcagtcacacgtggactgtaggataggcagagctaagctgacagggaacacgttccagaggaggggccgggggagggagaggctgccagggggtttgagcacctcctaagtggcccacagaacactgtgggtgagttcagtgtgcattctcctggagggtggggacacaagttttcacgaggctgtcaaagggtccgggacctgctactctgaaatgttaagaagctaaagagtttgtgttggcctgagaggcaaggagtgggacggggacttagggcaacggacacgcatgtggtaaaaaaaaggccctgtggtgtcggggaggcgaggaggtggccccggtcctgctggaggcggcgtagtttcaggagaggacaaaagtggaaagtcacctttatagtaggaatggagcgcagatgtaagtggcggcaagctaacgccaaggggaggaagtccatcaggctcagcaatttccctgccgcgagtgggcaaacatctcacacgtgtacacaaatatatttggacacgggtgcttactgcagcattggcggtaaagtggaaggtataaccaaaatgcctataaataaataactaaggccgggtgcggtggttcatgcctgcagtcctagcactttgagaggttgagtggggcagattgcctgagctcaggagttcgaggccagcctggccaacatggtgaaaccccgtctctactaaaatacaaaaaatttgccgggcgtggtggcacatgcctgtaatcccagctactctggaggctgaggcacgagaattgcttgaacccgggaggcagaggttgcagtgagccgggattgtgccactgcactccagcctgggcgacagagcaagactctgtctcaaaaaaataaaataaaatagaataaaaggctaagtaagtacttaggacaggagtggaatatcagaccattagtagaaagaatgaagcacaaacacagtagaaagtgataaggaaagatacaggctaaatattaggtaaaagagcaggtggcagaaaagtgagaaaaataagatctcttttttgaagaagaaaaaaaaaacacacaaaaaaaccctattagtccagccatgaaaaggaatgaagcaccaacacgtggtacaaggtggatgaaccttgagaacatcatgctaaaaacagccagtcacaaaaggctacttactatatgattccattttcatgaagtttccagaacaggcaaatccacaaagacagaaagtggcttagtggctgccaggggctggggaagggaggtggggagtgactgcttaatggggacagggtgtctttttggggtgatgactctggaattagatggtggtgatggttgcataaccttgtgaatatactgaaagccactaaattgtacacattaagagcctgaattctgcggcatgtgaattacatcccaatgcaaaaaacactaaagaattcgtatgtatgttttacaggcctgtgaaatatctgaaaccatccacaccaaacttttcttagtggtgggaggggcagaggagagaggaagaagcagccagaggctctttttttcttttttacaatttggatttttttttaatgatgaaaacgtaagacttttataatgtaaaagagaagcagtcagaattatggggactacacacaggatcccaaagtcctgaaatggtcactagggaattctggggacagatcactcaggtggcttggagggcaccacctgtgtttcaaagtccagtgatgatcactttagaaaatggacaacgctgaggtcaggtggacccacgctactcagactttgtcagtgaccttatgttttcacggctatgaagtatctgcacgccagtaagtagccaatatagtggtcaccttttaaaaggaagagttgacttaaaacttgtgcctgctttgactttaacacctttacctgtgcagtcggtatagaagccagggccacacgtggctgctgagcacctgaaatggggctggtccgaactaacatttctaagacttagcacacaaaaaagaatgtgaaatatctcgacaataatttttcatataggttatatattgaaatgaatattttcaatacagttcattggatgaaatgtattattaaattactttcacttgtctctttttactttttaaaatgcagctactaggccaggtgcagtggctcatgcctgtaatcctagccctttgggaggc[135 bp omitted]gtgaacccaggaggcagagcttgcagtgagccgagatcgcgccaccgcactccagcctgggcgacagagcaagactccatctcaaataaataaataaataaaaacaaataaataaaatgcggctactagaaaattgcaaatttcacacgtggcttgtgttatgtttctttattggccggtaatgatctagaagacacttagaataaatcatctcaggataagtttaagaattcacaaatattttaagagattctattttactagaaagtaagcaaaatgatttttagatgtagatgtgatctctatctagtaagaactcatgtaattttgacaaataattactctatttggtgtcccacaaatacagttagacatggcctctatcctcaagggttttgcatggatggggtgagaaagaaaaggagacatacacagataattccttacgtggcaaaaggtaacaggtgcagactccagatggaacagggtaccataaacaatggggcaggggagtctgggcagcatcccgtcctggaccctgctggaggtggggtagggaaaatcaggcagaggtgtaaacaaggggagggtgtgtggggcagggaaggggtcaagagaccaagctgggtggagctcggggaataaagggggaaataggatggaccacttggagaaagtctacgaatgcgagtcagagcccctggactgcaccacaggggcagaggtcaggaaactaccgcccaccacccaaatctggcccagccgctagcctgtttgtgtatggcccatgagctaagaatggcttttacattttgaagtggttagaaaaaaatcaaaatcaaaatattctgtgatgcatgaaaattacatgaaattcacatttcagcatccataaataaagtttgattggcacacggccaggcccaagctctcacatgttgtctacatctgctttcaagctccatcgggagagctgagtagttgagatagtgaccatctgggcctcaaaagctaaaacatttactatctagccctttatagagaatgtttgctgatccccacttccttggaatactaaaacatcctgtgggcttcctttgctcaaataaaataaaggcactgctcaaataaaataatggcacttgcgccaatctgcagaaatatttattgaataggttcctcgaatttaaaacattttccctaccaatatttcttaaacccttggtagatatttcctcttatttgctaatgaagagtagccaacaacaaaacaaaaactaatgtgataccctgcaggtttcacattattgggaagccctgtaccagtctgtctcacccaatcaacagcagttttaaagaatgtatgctcatagttgatactgcgcacactctcgtttttgttttttgttttgttttgttttgttttgttttgttttgagatggagtcttgctctgtctcccaggctggagtgcagtggcgcgatctcggctcactgcaagctccgccccccgggttcatgccattctcctgcctcagcctcccgagtagctgggactacaggcgcccaccac[138 bp omitted]cctggcctcgtttcttataatttaatcatgttgcattaataaaatatgagttcacatgatttaattcaacgcactcctggtattccatgatgttccaccatatcatgtggtctccccctcccagggtcccccaccatcttaaggccattgttgagggcagctggaagcaccagatttggaagaacacagaacaagaggaccagcaccatacccttcatctaagggaagaaatcggaagtttactttaacagtcctgcatgagagggtctgaactggaacagtataatcagaaacagaaagggaagaatcaatacaagaccagtttgggtggtgggacctataggaagtagtgagtagaaaagagggcagtgggttagtgggggtgaagcagagtggggagaggatgagatgacccctagccttcaacactgggcaacagaggagacagctccatctacagccttggactagaccctggggaggaagaacgagcggtccaggctactcgggtttctggcaagagcagggtgcccaggctgggacccacacatctctctttcacttgggccttgcctttcttcctagaccctgggcccaaccctttctgaagcaacaaagaggggaagcaactaaggagaaaggcaaattgcatggagtttagcggcaggaaagattcctcagctacctgcccaaaggactgagacatgcattaagatatctttacccttctgagggcgtgatcatcattccaattccaccgggcttttacaaggattagaagtaatacatgtaatacaccaggcacatagtatgtacccatgggtaacatcatggcaaccctttattattattaattattattattattttagagacaggtctcaccctctcacccaggctggagtgcagtggtgcaaacacggctcaagtaactcgtgggctcaagtaatccttccacctcagcctcctgagtagctgggactacaagtgtgcaccaccaggcccagctaattaattttttgtgtgtggagacagagtcttgttatgttgcccaggctggtcttgaattcctggcctcaagctatcctcctacctcagcctcccaaagtgttgggattacaggcatgagccactgtgccaggttccctttatttttaaaacataaccttggtgatctaacaggcactacttttaaagtctggctactccttactgagggctgctttttttgcccatttgcttgattctgtggccaacgtaacactctctgctgttcttgaaaaaccctctttcttcttttcttatacaagaatcaaaaatgttatcacacagcattgaacattcttatatagatcagagaaggtgaatgactcgataaatgacgtcatacatgattttatctatgagctttgtaaccagacaactaaatgtataatttattccagagtgtctatttggaaacaataaaagaactttgctacccctgaagtttatcccagcctcagtggtttatattttgacttgcattaaaaacgacctctcctcctgatgagaactgttactggtctaactagaaatgtggggctacattgcgggaacttgagaaatgggggctctccctgcaccgagacagcgcagtgggtgcttggctgataataacacctgtaaagaggccgcaagatagagacttcagtgagatgcgttttcgtccaagttcgtcagagccacctgggcaatgatcttgagtcagtgtctctttggtggttttagcacattccaggaccaccaatactaccatttactatttttctttaacactcagctctcaagttttgaagtctgttcttcgttaaacgtgagaggtcaggagtgttatagaggggttaaagataccttaacacccacgagagactttctcctcagcctactgggaaggcctaaaaaagaactggaaaaaaaaaagaggattctgctttggcagatccagtggtagcagatccacgtgttgggaaatgcttttgagctggggaacaaagctggggaaatagatctttaagaaagggagccaaggttagaaatatttgcctacaaagtgagtaaattttatgtaactctgttaattctctgtaactgcttcctctgccactgctcgtggcccagggctgactttttggggtgaccccaaatgtatgcagctttcaaatctttcacaaactgcttgaaccacaaaaaaaaaaaaaaaaaaaaaaaaaaaagctaagggttaaaatacaacttgccctataaccttgctttccctcagagcaaaaaggagaattcattggttcaacaaatgctgagtgccacatttcgttgctgaaacaattctaatagacataacagctctatatttgttccaaattgactttttaacagagtgaaatctttgaaaagttccaaagcaaaacaagagacaaatcaagccactgcaatgggctgggacatagaattcgggatttcatattctccactgtgtactcagctcctagcaatgagactcagcagcagctctgttataaaacccctccccgctccccgaactttctggaaaaagaacttcatttgcaattttggctgggtaaaaagggaaattaattaacagtaggggtctttgattaaaatttcttttgaaatttggtaaaggaaaagtacatattgaaagagctggaatgttaattgagatcaaatcgaaaacatggagtttgaaggttattggatctcaggcacgggctgcgtgatttttttttttttaagaactgaaggtttaccatcttgatgtaggccttgccgtcctgaagagcactcgggctcatgtgtttcattcactcacatgttaaatatgaagccctatgtacaacatagcctgtgggaactgtggcaggggtagctgtctccatcctccagaaccttgtcacaatcaagaataggaaatgagacgcacaaatcactaccacctgtcgaagtggccttgcagtgctaaatctaagtgctgaggcaatttgcctgcagtccttgccacttcttgttgattagtccagcagcccccagctgggaggcaattctgttcaccctcactcccacctcaggacatctggcaatgtctggaaacagttggttgtcaccacttggggaaaggggagtgtgcttttggcaggtagaggcctgggaggctgctccacatcctacagtgcacagaacagtctccccaaccaagaataatctggccccaaatgtcaatagtgccagggtagagactcagctctagtttatattttccaacttagctcctcaatgaaaatctcaagtttccatggcaagaggggattaaagaagggtcttgagggaagagtaggattttcttcagtagaaatgacattccagagaagggataagaaagtacaagacccgtttaaagtatggcaagctcatttggagtagtgaaagggaggcaacgaaaagggagatggggctggactgaaggaagccttgaatgtgtggttacaacaaaggggaggggacagtttgtccgtttggctaacaaaagtagtaagaaagtgcccttccgttcctcctgacatagctcaaagagacatgacaaggcggttgggagaagaggaagagatcagtaagaatccagagacgacagagcccaaggtctgtgcaaagagccgcagggagacaatacaggaagtgattaggcaggaggctttggcggcgaccggaaggctggagaattattgcctctgtaacaggagaggagggctacttccagtaagaaggaccaagactccagaggccactggcactagaataagaagagaagtaggctcatgcaggcccacgtaaatcggaggaaggtggaagtttcctgaccggaagtctaggtgggaggcgccatgttgcggcccagccgctgctactgactccaccatccggcagttcgtgaaattaaataactgcaaattgatgagtcttttcttttgcatgctgagtctctccaatgagcacactcatcagtgtgaaccaaggctggcaattaattgaattatattgatttaattgaattaattaattgaattatattgatttaattgaattaattaattgaattaattaatcatatccatttccagaagtaatttttactcacccgcgtctgtcattttaaaggtctgcagtaaaaataccaggatttacacaaaagatttgctcctgagacatatcctgcttttaacttaggctctgaatatcagttgccaatggtttctaacaattttaaatttgtctagtgccttctcccctctcaactgtccacatgacgatatattaatacacgtaaatgcttaactaattataagctcctcagatgtttgatatttcaggcccacaaatattttctaaagaaatggatggagaccccagagagctcctcactgaagtccctagtagggtgaattcttcaagaaaacgaataattccttttaaaatcagaagcacatcttttagtctgttttcagtgggtctggaattccaaatatattttttctcaaggcaggctacatctgtctgtatgtattctgagaaggacaggagaggtgggaaaaaggccttcgtgttattttctttgggtttccactggcctgggtggagcccgcatacatttttgtgggctggtaatttttttggaaactgcttctaaggcctttccccacagatcaccttttggacagaaatgtatccttggaaacatggcacagtttctaaaagataaacagtttgcatttttaaaaaagtataattaagtgctgttgcagctttaggaatggacttctatatcattggtataatttcaacagttttccaggagacaggcgttcatgagtcaagccttctgcctttctgtggggacccaatcctttttcacatgggacttgggcaagtctaatctttctggttgccattggatctcactcttcatggtgctcagttcttgaagttatttcctcctttgccttttgagcctctgtccaggttctccctctacctaagagtccctttgagatctctgcttagcatggttcacaatagctgtaaggtggaaaccacccaagtgttcatccatggatgaatggggaaacacaatgtggcatatccatgcaatggaatattctttagccttaaaaaggaaggaaattctgatgcatgctacagcatggataagccttgaagacattgtgctaagtgaaataatccagtcacggaaacacaaatactctatgattccacttatatagtgtatagtcatcacattcacggggacatgaaaacatgggccgcccagtcctgaaaacatggccacacccctctcccccatctgctgcctgcagaacactattctcaagatgcagttcagatccacatcctcttttcagacctttcctcagctccagggacagctggcctccccactttgtctgccctctgtgccctgtagaaacatctagcaaagcctatttgatactgactcctcttccttgttggtctttggtctttgtaactggataggatagcactttactcaaaataggcaatgaataaatgaatgaaggatgaatgaatgaagattgtatgaatgaatgatgaacaaatgtcaggagtctgaaaagcaggtcttccggtaaatgactggacacctttgatctgacaggtaccggctgatgtgaactctaccaatgatccagtttatacttcgaatagcatccaaactttgcccatggcctccaaggccctgcaggttgcccctgcctcttctgcctctccttgctttgctcgccaggcatcagccacacaactgcaggacctttgtacctgctgcccccttcctggaaggctcttccttctgaaccccacagcgctggttccctctcctcatttcagtctcagctcaactgtcacctccttaaaaactgctggacgccaggagcccagtccgcatcacacggccttgcttttttgtctctactgttcaatttttcagccaagttcaaatacaagaagcctcttatggccaggcacagtggctcacatctataatctcagctacttgagaggctgaggcaggaggattgcttgagcccaggagtttgaggctgcactccagcctggacaagagagcgagacttcatctcgttttttattatgaattacccatcccccagtctcagacatatacacaaacacatgcacacacgtccaaaaaaactgcagagatcttagtagaaataggcttaccatatatagcacatctgggcttcattatgtaataaatgacaaataatcactatattggaccattacatgtaagttctacatatttttaatggcttttcagctttttctccactttgaaacatggactgtagcaggtgtaaatggactgacagcatttaaaatctatctgctttatgtatcatctacaggcagtggcaagtcaactgtactttttagaaagtcatggaattcacaaacattaaaaataagaataaggaattgccagggcatacaacagggttttcaaacatgcaagacctatgtatcataaaacaggaatgcactttcaggaaaaaacaactgaggtgcagcaaggccaggccgtctgctcctaagggcccaactcaagtcctggcacgaagaccaggccagtccccggctccaagtggctcatttccagactctgactgtgttggcatccaagagccagtgataacagagaagggaaaccagtcttaaaatgttctcatctgtagagctggccactccccaaaactcatcataaatgtgatgtttggggagtcatttcagagggacccatgccacaaccaagatgtaggactccaacaacttttcgtgctgtttttgttcttacgaagcacttatgtttgcagagggacatattagtacccatgagtttctaggttaatttaagggaatttcctaccctaaaacagacagcatgaggccgaccactcagtcaagcaagatgtatgtactaaacgcctccttagcatttggtcctggtcaggaaaccacagtaaaaaactgatcatcccaggccacttactacttatttgcttcatcctaataataataataataacaacagttacttttttctgagcacctattagatgccagcccctgtgctaaatagcttatagaaattatttctaatatagcaaccacacgagctattattatcgatttcacagatgtcaaaccttgccccagagccactaagctaataaacggtggcaccacaatttaactccttctctgctgtgccccaaagccctggtctgcaacacccagcactatgacctgcaacttttcctttcctctttcccctgccccattcatccagattcatccaatttgggctctactgactcagagatggcaatatgaacttaaggtacc[216 bp omitted]gaggcaggagaatggcctgaacctgggaggtggagcttgcagtgagctgagatggtgccactgcactccagcctgggcaacagagtgagactccatctcaaaaaaaaaaaaaaaatttttaagggcagggtgtcgctatgttgcccaggctggtctcaaactcctgggttcaagcgatcctcctgccctagcctcccaggtagctgagattgcaggtgtgagccaccacacccaatgcagctctcaactcttcatttctacatatgctttccccataagtgtcaaggaaaccatttgtttattcatttcacaaatatttctcaattgcctactcagca[132 bp omitted]aaaccctgtctctactaaaaatacaacaattagctgagcgttgtggcacgtgcctgtaatcccagctactcaggaggctgaggcagaaaaattgcttgaacctgggtgtcagaggttgcagtgagccgagattgcaccactacactccagcctggtgacagagtgagactccgtctcacaaaaaaaaaaaaaaaagaagttaataaaacagaagttcctgcccttactgagctgacattctaacaagaggacagtgataatacaataaatacgtataacttatggtgtgttatataggaataaatgctaaggagacagagaaagcagggaaggaggctgagagcacccattctcaagtgggtggcctggtgacatctgagaaaaggcctgaagaaagtcggagagccagccctccaaatacctgggcaaagagctttccaggcagagctggaatgagcttccagaggccagcagggtggaagtgcagtgagggaaggcatctagcttggcgatgaggtcaaagaggtattaggcttggcggggagtggagttaggggtgactttggcttttgctgcagatgagatgggagccatcggagggtttcgagctgaggggtatgaagtagaacttaacatgacgccgcctctcccagggttaacaggccccgtctggctgctgggctgagagactgccgagcaccagtggtggaatcatccgggctagatgctggtggctgggaccagaggggctggcagtggaggtggcgaggcatggtcaggttctggggaactactgaaggtggagtcaacaggatttgctgatggcttgggagagaggagtcaaggacagtcctgaggtttggcctgagtaatgggaagaagtgagttgatatgtaccaacgagtttggggggtgctttgggaggagtagatctggggggactatgacaggctcagcttggccaccttaagtttaaggtgcctgtcagaatccacctggatgtacccagcaggcagctggatagatgttttctgcagagaagagcttagaatcctaagccagtccagagcttcccaggctccagttccctataggcctgttagggcctctctctggaccttttgccactcctccttcacctacccttatccctttcgcccacttcattctgggtcttcccctatattttttttcctgggagaatccttttgctgatcttagagtttccaagaagcaagtaggtggttttcagttttttctctaattcccagtgtatattccatcggcctgcccatccatccatccatccatccatccatccatccatccaacaaaataagacctttcactacaccaggcatatgtctacatgagagaacatgagaacatgaccagcagaggagctaattgccatttaaattctagagacggagtcaaaacatctttttaaaaaatacataagcccacaaccccttacaacaatactgaaatccaggaaactctgaaaactggcaatttttttgtaaatttggcatggactcacttggtgacaaaagctggcctgaattgacatgaagttacttatggtccttctcttccccacttcgggtgaatattcatatagttcagttcagaaatacggctgtgtttagtgggaatgccctggacccatagtttcagagacaggcccacagactcgcattctcctcccctgcagtttagtgagtgtcctgacaagcaagatgagaacttcccttggtttttcaaaagtttcctattttacaagtaagtgggtacctatgggggtatactgtttaaatgtttgtaaatatttaaatatatttgttttatatttaacatatatttatatttaaattttattatatttaaatatataagtatatattatatatacatgttttaatatttcaatatatattttaaaaatatttaaatatttaataaatagatgtcaactttagaaacaaatatatattataagatgtggttccttctggccccagcattttatgagcaaaacaatcactagctactataaaaatccacaggtgccggccgggcgcggtggctcacgcctataatcccagcactttgggaggccaaggtgggcggatcacatggtcaggagatcgagaccatcctggctaacacagtgaaaccccgtctctactaaaaaatacgaaaaattagccgggcgtggtggcaggcgcctgtagtcccagctattcgggaggctgaggcaggagaatggtgtaaacctcgggggtggagcttgcagtgagccgagatggtgccactgcactccagcctgggagacagagcaagactctgtctcaaacaaacaaacaaacaaacaaaaatccacaggtgcaggggccgggtttggtggcttacgcctgtaatcccagcactttgggaggccaaggcggttggatcatttgaggtcaagagtttgagactagcctggccaacatagtgaaaccccatccctactaaaaatacaaaaattagccgggtgtgggggtgcatgcctgtaatcccagctattcaggaggctgagacaggtgaatcccttgagcctgggaggtgcatgttaagg[132 bp omitted]agccaatttaatatttttattaattataatgctaatgtaaaactaaacaattagatctaaggaataagacccagataaacaattccccagcacctgcatttctggtggacagaaccatccttagcagtacttcaatgataaacaatgttaaaagatgagtatttacatttaaatatacatcacatacacattatattatattgttgtatttaaatatacatcacacatacattaaggtaatgcgtgcccttcacgcagaaagcaaagatcaagtgatttcaaagaacttgtcctgttattgaggtaataactgtctctctcttctcagattcagtggtttataagaaagaacttaaaaaactaaaatatttcagtattgcttttcctgcaggagcaaactatttcagaactcattcccaacccaagtccgttgaactgtcacagaatcacagaacagtgatctttcccatcatacattataagttgccttccgtaccacgcctgttgatgaagaagccctagtaattcaagaacttaaattcttttcctagggaggttaccataaactcttacttctctggtcagagtaggtgagttgtcgtttctaaggttattttagagtcagttcaagtctttaaactagagcaggagaaagcacagatgcccccctcctccttatccagaaggacgggaggtaaggatctttccataagcaaacaatgtttcagggcacgatgtaaaaagataaaatacatgtcaacaatatgtacaggcaaaaatttttttaaaaagtctttgttgttttgtgtcattattattattactgttactttgttggggaactcttagttgaaacagagaatgaagcttgtacaaggtttgatacagagatgaagctgactgagagggaaaagaactcatcgaagcctgcgctggtcatttatgatacaaagcaggaaaataattgcagggaggcacaatgctaacaacaccccaaagtaggaatgaagcctgggggggcgggggtaaggcagccagccctgggtcccgagctccatcttgccctctcccctccccattcttgccgcacaaccaggaggttaaaataggaagatgaaccgcgccggcagccgccagaatggcccgggcgcttggggccctcgggggcccttgaaatagccactaggatcgggaaatccaactttcccagcggtgcagcgaggaaaaccaaaaggaacggagccggaggctggtggcgagggagcgcggaggcttctcggagggaggaaaaagaaagaaatgagcatttggggtgtgagtgagtgtgtgtgtgtgagtgtgtgtgtgcgcccgcgagcgcgctggtgggcggtgggggcagggggtggagtttaaatccacaaacacacacacgcactcgcactacctcggagaaaatgcctggagcagtttaggttctttaacaaaataaataaattgaaaaaaaaaaaaagtttcactcgcgttggtgaaacttttctcccttccagatcagtcctaagaggagagctgcggacgtgcggaggggcatcttgggggcacgtggaaagactggcggacgcacgaacccctatactcaggaatatggggtcacagggagaaggggagggggtgtccgaggcgacctgaacgcgaggatttggggcaaaaaggtgagaaacagttcccggggaagctcgctcggggagtttgggatgaaaaggtgagaagggcaagaggggttctccccagggcagacgcaccagcttttagttaaggaatgagaaaaaggttccaggggtgcccccaaattcagtatgtctgggagtccattaaaaagggggtccccgggacaagtcagatctaggaatttggggtaaaaatgagaagggagtcttcgaggtccccccgatgcaagaagtttgcgactaagagtgacagaagggctctggggtcaccccaatttcggaggtttggggagtaaagtaagaagagggccccaggtggccccaattcagggagtttgagggtatgagtaaaagaggggtccccgggtgtccccatctcagagatctggggagtaaaagtgaggagagggtccccaagcgcccccaattcagagaattcgagggtttgagtaaaagaagggtccctgggtgcccccaactcagagatctggggagtaaacgtgagaagagggtcccctggcgcccccaattcagaaaattcgagggtatgagtaaaagaggggtccttgggtgcccccaactcagagatctagggggttaaggtgagaagagggtccccaagcgcccccaattcagggagtttgaggagtttgagagacgttcccggggcgcccccaactcagcgagtttgaaggtaagcgtgagaaaggggtccccggacgccccaacctcaggaagttttgtaaaaagtgaggcgacggcaccgcacctcccccgcgttcagtcaataaggaaagtggggacgtcgccagggtccccccaaactccgccgcgcgcgcggacggggtggcggaggcgggtcccgcgggcgcaccacccggacgtttggggtgagcggcggggacgtgctgcccgccccccggcccccgaacggggtccccgccgccccccacactccccggccgggctgggcccggggcggtcgcatcggtcacctggagttcgggccgggagttcgggcagcggctcccgcggcggcggcagcggctgctgcgtgttggtccccgttggtaagtaacagtctccacggctacagtctctatggcggcggcggtggcggcggcggccgctcctcctccggctcccgccgccagccagcctcgcgcagcccgcccgcccgacggggcggggcgttgttaccggcaacggttaccaggctccgcgccccaccttcctaacggcccgcccacgctcgcctccaacgggcccccaagagggcggggcgcgagaccctacggcgttccattggctgtctgcagagtctgtcggaaggaggaggcgttcccccttgaaaaagagtgcgagactcggccaatggccgcgaagaggggcgggtcttggcgggaggcgcgcgcggctcagagggttggcgaaccggtcgcgcgcgcggcgccgtgggttggtggcgcgttttgggaaagtccagttttaggggacccaagggactccgtttaccccacaggaggagtgtgggacatgtgggaacagtctgatcaggggtcagcaaactctcgctcgccgcctgtttttcacggacccccagctgaaaat[224 bp omitted]gaggcag[136 bp omitted]aggagcttttgtggggtgtgaacctgataggagactctcttttattgtattgggcccagtattttgaactagtttaaagattggcaaactgcggcctgcgggtcaaattctgcctgcttgggtttgtaaataaagctttattggaacatagccacgcccatttccttgaacagcttggaaggctgctttgacactacaggggcggagtggagtagttgcgcaaagacggcatgtcccacgcgaagcctaagatatttactatacggtcctttacagaaaatgtttgccaaactcaccagccctcctctcaagctggtagattcagctacgagtaggacagaaacagacagatcctcatagaacttttattctagtgagggaacattgacagcaaacagaataaagaggtaaacatatagttattcgagacaaggggctggaagaataggagaaaacaacttgtactgagaaaaggcaggagattaggcttcagccccactcattcattcaacaagaaatcatattagtgagcactgattaaattgctatgtgcctgaaagtgatctaagcattttttaaatatgcaaactcattaaatcttacaatcgcatctttagaaagatgctaggcattatccccgtttttatttgttttgttttttctttttttttttttgagacagagtctctctctgtcacccagactggagtgcagtggtgcgatctggctcgctcactgcaacctctgtctcccgggttcaagtgattctcctgcctc[134 bp omitted]tggactctcaaagtgctaggattacaggcatgagccaccatgcccggcctttccccatttttcagatcaggaagctgaggcccagaaagaatgagtgaatttgcccagtgtcaaacagcttgtgagggatcggaaccctagtagtctagtgccaaagtccatgctcttgatcactagatgggtggttttcaaacatttttgaccacagcatacagcaggaaatacattttacctaggggctcagtccacacaaacatatctataactaaaacaaatgatactgtaactaaagtaccgtgaaatgatactttaacgcactctgatatttcctgttctgtttcattttaattaaaatgttgacggtgatttgctaaattgatttcatcatcttctaatttttttttttttcttgagacagagtctctgtcgcccaggctggagtgcagtggcatgatctcggctcactgcaacctccgcctcccgagttcaagtgattctcctgtttc[133 bp omitted]tcagcctcccaaagtcctgggattacaggcaggagccactgcgcctggccatgtgacagattcttaagctcaagtggtctacagtaatcagtccctttcattcaattattaatttagtcaaaaatatttattgaggtccaagtgcagtgactcagcaggaggatcgtctgaggccaggggttcaagaccagcctgggcaacatagtgagaccttatctctataaaaataaaataaattagccaggcgcagtggtgcacacctatagtcccagctgctcaggaggctgaggtgggaggatcgcttgagcccaggagttctaggctgtggtgagctatgactgtgcctctgaactccagcttggtagacagagcaagaacctgtctctaatatatatatatatacatttatatatatacacacacatatatacacacacatatatgtgtgtatatatatagtatatgatgatagatagataggtagatagatagatagatagatagatagatagatagcgcctactatttgctaggtgctagggacacaggtgtaaataaaatagataaaattcccatggccataggaaaagtgatacagtagtggcttggtgggagaagtgggtgggtggggcttaccttagatagagcagccagagatgatctccctgggatatccaacaatcctgcttggcccaagactaaggggtttcccaggatatgggaatttcagtgctaaaaccgggaaatccccaaagcgggaagagttggtcaccctgggtctctctaaggagctgacatttgaggcaacgttggagtaacgaggaacaaaggaaaatagtttggaattcgaaatccctggggtgaaagctgatgtggaagaaacagaaagcaggtccttgggcacagctggagccaatgaaaggggaagagcagtgagtgggtggggtgagtgagtcaggggatgatatgatggccatcattttattggaggccgtagggaagaagtcacgatcagactgggaaaccaatggagggtgtcttttgttgttgttgttgttgtttgtttttgagctggagtcttgctgtatcgcccaggcccacgctggagtgcagtggtgcgatctcaagttgtagcctcggggagtaaggtgaccgcctgtcctggaactgctggtcaacccgtttagctaagctagacctcttcccgctcccagccctggccagaggcggaaactgtggccccagttatctcaaaagacaagcacagagtagcaaaagacaagccaacaggtggcaaattcttagagtcctgcttttgtgcggcacatttttgtaaattaaggtgacatttacataccataaaatgagccattttaaaaggaaacagttcagtggcatttagtacattcactatgttgtacaaccaccacctatatctaattccaaagcattttcttttttaatttgtttttttttttatgatggagtcgcctgtcacccaggctggagtgcagtggcacgatctcacctcactacaaccttcgcctcctggattcaagcgattctcttgcctcagcctcccgagtagctgggattacaggtgcacgccaccatgcccagctaatttttgtatttttagtagacatggggtttcaccatgttggtcaggctggtctcaaactcttgacttcaagtgatccggcccccttggcctcccaaagtgctgggattacaggcgtaagccaccttgcccggcccccatggagggttttaagcaggggtgtgtgcggggacaggtggggtggggagtgggtggaatgtcacccgatctgtgattttattttattttgtcaattaattatttttttaagagactcttgccgggcgcggtggctcacgcctgtcatcccagcactttgggaggcc[134 bp omitted]gaggcaggagaatggcgtgaacccgggaggcggagcttgcagtgagccgagatcggtgccactgcactccagcctgggcgacaaagtgagactccgtctcaaaaaaaaaaaagactcttactctatcgcccagggtggagtgaagtgacacgatcacagctcactgcaccctcagactcttgggttcaagggattctcccacctcagccacccaagtagctaggactataggcatgtgccaccaaggctggctaaatacaagaattttttttttttttgtagagacagggtcttgatctcctgatgtcaagtgatcctccttccttggcatcccagagtactggggctacagggatgagccaccatgcatagcctaaactataattttaaaagctcagttgaggccaggcccagtggctcatgcctgtaatcccagcactttgggaggcctagaggggtggattacttgaggtcagcctggccaacatggtgaaacccggtctctattaaaaacccaaaaatgagctgggtatgatggcaggcacctgtagtcccagctactctggagactgaggcaggagagtagcttgaatctgggaggtagaggttgcagtgagccaagatcgcaccactgcaccccagactgggcaacagagagagacaccatctcaaaaaacagaaatgaaaataaaaataaaaatgaaagctcagttgagccacctcatggggaatagattgtaggagacaaaagggacagagagagatcctaggagtctgtcccagttctcctgggtgggaaagtatggtggcttggtttagggacctggtagtggaggcggacatgagtgggtggactgagggtacatttggaagaacactctagtggactagatgtggggagtgaaggataacgttttagggtgtgacaggaggtgccttgtagctggtttgtacactccgttctgctagaatgcttgtctttgaaatgtcagttagtcccaaagtggtggatataataggaaacaatttgagcacaatgtggattttgccttccttatgcacaattttgtctgcaagaaacactaggtaaatagaaaactgcacctgtctggaccaaatcgtgtaggactgcacaaaatatgcataagcacacatctgaaatatctaccagccacctcagcttcctgtgaattatgagccacatttatctatgcctagcattacaactttccatctgattacagatgacttttctaccttttcacaataactcacaagctgcaatccttcaatagcaacttcctcaagcaaacttcagccctttttcatggcaatgtggcatatttactatagtatttatatatttcttaactaaccaaaatgtgtaaaactcttcaatctcaaagaagaaatcatgagggaaattagaaaatacattaagggccaggcacagtggctcacacctgtaatcccagcaattggggaggctgaggcaggtggatcacctgaggtcaggagtttgagaccaacctggccaacacagtgagatctcatctctacaaaaattaattttaaaaacttagcagggcgtggtggcatgtgcctgtggtcccagctacttggggggctgaggcaggaggatcgcttgaggccaggagatggaggctgcagtgagctatgatcacgccactgtactccagcctgggtgacagagagagaccctgtctcttaataagaaaagaaaagagaaattgctgaagtgccacattcctgttgacataggacacccagggcagacagcgaggagacagatgaagcttaattcttgaatgaatggaggtaaggctgatattttctcctagtggactctggtccagttcattccagagacaaagctttgcctccttaaagtagccacttgaaccatgttggaggaccttgttgggcacagcttggagaggaaatagcagagctgaagtctgcagcagaagaagccacaggagtggataaccaggcagtggtagagggaaaggggtgtgcacaaggcaacacctgactcccttgctcctcttacctaaggcccaagggcaagtgacaccaaggaggaatcattttcaggatggccaactcatcctggtttccttgggactttcccacttctaaaactcaaagttgcagttccccaaaatgtaaaaagtggaattcccatgggatccagcaattccactcctaggtgtctgcccacaggaagtgaaaacttaggtcttcacaaaaacttctacatgaatattcctagcagcattagctcataaagccagaaaatgcacacaactccagtgtccatccatggaggaacaaataaacaaaatgtgatctaggccgggcgcagtggctcacgactgtaattccagcactttgggaggccaaagtgggaggatcacttgaggccaggagcttgagaccagcctgggcaacaaagtgagacctccatttctaaaaaaaaatttaaaatattagccaggcatggttgcacacatctgtagtcccagctacttgggaggctgaggcaggaggactgagctcatgaatatgaggctacagtgagctgtgatttcactactgtattctagcctgggcaacagaggctctgtcaatgaaggaaaaaaaaagaaaggaaggaaggaaggaaggaagaggaaagaaaggaagggagagagaaaaagagagagagaaagagaaagggggaagaagggaagagagggggaaaggaagggaaggagggagggaggaggaagggaagaaagaaaagaaaaaggaaggaaggaaggaaggaaagaaagaaagaacaaaagaaagaaaaaggaaattacctaggtgtattcccaaatttttggctgtgaaatgaattctttgcctcacatcaccccataataaagctgtggtaaagcttcagttcccatggaaggctagtgaggagggttaggtgtctagagacctgggtttggagttaaacaggtgaaaatggagctgttttgaaggcaaggggcacaacagagtgtttgcatgcccagaatcaccgatttgaaaccccagcatcaaatgattccaaggatgggtctctgtcacctcaaatagtctgtgagtaaaaaacataatttaagatgaggcattgagaaaaagtggatgacaaaaacctggaaacaccctaaacagcctacaataaagcactgattacccaaagcagcattcagctaaacaatgaaatattatgcagcaatgaaaaagaataagatgcaactatccgagcagtataggagaatggctacaatctacttattaaacaaaaaaagtaaatgcagtacagtgttcacagtgcactcctatttgtgtttttaaagaaagatatttatttaaaaagagtaccctttaaagtagtaccttttaaagtagtaacctttaaagtgtatatctaccagccaggcatggtggttcatgcctgtaatcccagcactttgggaggccaaggcaggtggatcacttcaggccaggagtttgaaatcagcctggccaacatggggaaaccctgtctctactaaaaaatacaaaaattaccccagaaatggtggtgcatgcctgtactccagctacttgggaggctgaggcaggaggattgcttgaacctgggaggtggaggttgcagtgagccaagatggcgtcactgcactccaacctgggtgacgagcaagaccttgcctcaaaaaaataaataaaaataaattaaaaataaaaataaaaataaaataaagtatatgtctacctacagtgtgtgtgtgtgtgtgtgtgtgtgtgtgtgtgtatgtcttatagtagatatctatctatatctgttaccctttaaagtcaatatacaaacatttattgtttactatgtgcttaatagtttctccatcattttgccataagaactcattttatcttcatgataatttttgcattattagtcccatttacatataagggaactgaatgtattcactatctactgctgtgtaacaaattaccccaaagatcagtagcttaaaacaagcattcatgatctcacatagtttttgtgggtcaggaatctgggtgcagtttagctgagtggttctggctccatgtctctcaggagattgtggccaaactgtcagctggggctgcaggctcatctgaaggctcaactgggaaaattattcttctttccttccttccttccttccttccttacttcctccctcccttcctcccttcccttcctttccctttctttcctccctcccttcctccctccctccttccctcccttctttccttccttccctccctcccttctttccctccctccctcctttccctccctccctccttccctccattccttcttccttccttccttcctccctccctccctctcctctcctctccattcctctcctctcttctcctctcctctcctcttcccttctttctcttttgagacagggtcttgctctgtctcccaggctgctgtgcagcggtgtgaccatggctcactgcagccttgacctcccaggctcaagtgatcctcccacctaagcctcctgagtagctgggaccacaagggcatgccaccgtgccctgcaatttttttcatgttttgtagagatggggtctccttatgttgcccaggctggtctcaaatttctgggctcaagtaatcctcccacctcagcctttgaaagtattgggattatgagtatgaatcaccacacctggcctattcactctttcttccttccttacctttctctgtccccttctccctccttccttccacccctttctctctctctttctttctcttctttcttctttcttctttcttttttctctttcttctttttctttctttcttctttctctctcccctttttcttctttctttctctttttctttcttgtaagaacacttaacatgagatgtagcctcttacattttgatgtgcacagcacggtattattaactctaggcataatattgtgctgcatatcttagaacttattcctctcatatagctgaaacttcatacctgttgaacagcaactccctatgggagaggattcacttctaagctcactcacatggttgccagcaggcttgagtgccagctcaagagctattggctagagatttcatttccttaccatgtaagcttttcaacaacatgcttgagtgtccttgtgacatggcagctaggacctggcagctggcttcccctaggcactcaagacagaaaccacagtctttttatagcccaatatcaggagtgacatcc[222 bp omitted]gagccacagaattgcttgaacccaggaggcggaggttgcagtgagccaagatcatgccactgcactccaggctgggtgacagagtgagactccatctcaaaaaaaaaaaaaagaagtaagtcagtgagactggatgcagtggctcacgcctgtaatcccaacactttgggaggccgaggtgggcggatcacttgaggtcaggacttctagactagcctgaccagtctctactaaaaatacaaaaattagctaggtgtggtggcgcacgcctgtaatcccagctacttgggaggctgaggcaggagaatggcttgaacctgggaggcggagattgcggtgagctgagattgtcacgccactgcattccagcctgggcgacagagcaagactccatcccacattcaagggaaggattagataagggtgtgaacaggagacaatgggggccctgggggcccatgtaggggctgccccaccacactggggtacagaaggggtcagtcacttgtccacacttacagagctggctagcaaattgcaaagttgggattcgagcccaagcagcacgtctctaaaatctgagttcttcacctccaccctgtaccatgcctcctctgcgcccttttgcagcatgcttgtatatgcagatattatttctggaaagataaaaaaatacactacggatatacataacagtagaagggaggcttaactttcatcgaagaacctttcatgttgttgagtctgtctgcattgtttttatgtgtgtttaccaagcacagatattatttttcaatcttttttttgccatagaactcgaacggcatgataaaataaaaagatatttttctgctaaaatacaaaataaaatcaaacaaaattatttatttatttattcatttattttaaagatgaggtctggctctgtcacccaggctggagtacagtggtatggtcacagctcactgcagcctcaaactcctgggttcaagggatcctcccacctcagcctccagagtagctgggactacaggcacctgccaccaccaaacccagctaatttaaaaaaaaaaaaattttaagagacgaggtattgccatcctgcccaggctggtctcaaactcctgcgctcaagttatcctctggcctcagcctcccaaagttctgagattacaatcatgagccacccttccctgcctcaaacaaaaacatttagacagcacgcttacaaggaaagaattagtaaaaccacagggccagtgaaaacgagtttgggtatgagaacggtacaaaaactgcctccttcctgggacatttccaggtctgcttgagagaatttacccttggtgattgttaaaactatttttttttctcccagacgagcttctccctaattgattgtttttatttaactgatgactgttaattaaccagctctattagaactttacaggccattcacgcactgatgcgtagttttaacagcctcttacttggtacaaacctgagtctgagcatctgatcctttcaagagtagcataaaaggacaatttccataatgatggggcttctgaatagcggattttgtgtaaaaagcacctgagtaccgcagagatcttttatttgtctcgcggctttctggccatccgctgccacatttctctggaacacggaatcatttccatagcaaatacctgtgaccccgaacagccatcgaaggggcaagctgaatacacaccaagcacatttaaaagaaaaaataattttttttttcagccaaaggtattagccacttctaggcaaccgggaagcagaaggatagaatggctgtgcatgcccgtgttccatattaacttcaaaggcaaggaagaaggaaaggaaagaggaaaaagagaaatagaaggaggaaaaaagaatttggagagaaaataaaaggggtaaccgggcatggtggctcacgcttgtaatcccagcactttgggaggcccaggtgggtgaatcacttgaggtcaggagttcgagaccagcctagccaacatggcaaaaaccccatctctactaaaaacaaaaaattaggccgggcatggtgactcacgcctgtaatcccagcactttgggaagctgaggcgggtggatcacgaggtcaggagaccaagaccatcctggcaaacatggtgaaaccctgtctgtactaaaaatacaaaaaattagccgggtgtg[134 bp omitted]tcaaaaaaaaaaaaaaaaattagcccgtgtggtggcggcgcctgttaatcccatctactcgggaggctgaggcacaaaaatctcttgaactcgggaggtggaggctgcagtgagctgagatcgtgccagtgcactcaagcctgggcgacagagcaagatcctgtctcaggaaaaaaaaaaaaaaaaaaaaaaaaaacggtgaggaatgagaaggaaagaggtttataaaaaacagagaaacaaaaaatttcagtaacagaagctgtcaagcatactagctgccttctttatgaaaatagagataaaaatgttcaattctgggcgggcacagtggctcctgcctgtaatacccgcactctgggagaccaaggcaggacgatcgtttgaggccaggagtttgagaccagtctggccaacaaagcgagacttcatctctacaaaaacataaataaaatcaggctgggcacagtggctcacacttgtaatcccagtactttgggaggctgaggcgggtggatcacttgaggccaggagtttgagaccagcctggccaacatggtgaaaccctgtctctactaaaaatacaaaaattagccaggcgtgctggcaggcgcctgtaatcccagctactcgggaggctgcggcaggagaatcgcttgaatccaggaggcagaggttgcagtgcactgagattgcaccactgctctccagcctgggtgacacagcaagattccatctcaatcaatcaatcaatcaatcaatcaatcaatcaaatcaactgggcatggcgatgcggacctatagtctcagctatctgggaggctgaggtgaaagaattgcttgagcctggggaggttgagattgtagtgagcggagattgggccattgtatgataggcaacagagcaagaccctgtctcaaaataataagaactcaaaaaagagaatgttcaatgtttagcttaattacgactaagctgtaacggtaacatagtgcgttgactggtctaggttctgtgcctgaatgttaccaacttttcaggattgatacaaagatttaccttacaacttggcaaggcaatctaacgaaagggacagtgggggctttgcgactagttcccatctttataaacgacattggcttcatctgcattattttaaggacatcactgtgtgaactgtaccgcttttattattatgactgttttaatagacacaggaggctgggcactgtggctcatgcccgtaatcccagactttgggaggctgaggtgggaggatcacctgagctgagggaggttgaggctgtagtgaacgacaattgtgccactgcactccattctaaacaacagagtgacaccctgtctcaaaacaaaacaaaacaaaaacaaattgagatgtaacttacagatgtcaaagtgcataattcttaattgtttacatatgtgtgactttttacgtgtgtgtgtgtgtgtgtgtgtgtgtgtgtgtgtgtgtgtgtgtgtgtgtgaatccttaccaccagcacctggatcaaggtatggaacatttccttctccccagaaggttctctcttgtccttttccagttaatacctctaccccatttttctgacttctaccaccacgtgtattttgcttactcttttattttaattttttagacaagtcacccaggctggagtgcaggggcgcgatcttggctcactgcaatcaccatctcctggttcaagcgattctcctgcctcagcctcccaagtagctgggactacaggtgcacaccaccatgcccagctaattttttgtatttttagtagagatggagtttcaccatgttggcaaggcttgtcttgaactcctgacctcaagtgatccacctgcctcaacctcccaaagtgctgggattacaggcgtcagccaccgcgcctggccttttctggcttctttagcatattatatctgtgaagttcattcatattgttgaatgcatcagttgttcattcttttaaaaaaaatctgagtggtatttcattataaaaatatatcactatttataggtttattcttttgttgacagacatttggtttgcttctaatattttttaaaaaaaattttttttgagacagagtcttgctctgtcttccaggctggagtgcagtggtgagatcttggctcactgcaacctctgcctcccagtttcaagtgattctcctgcttcagcctaccgagtagctgggattacaggcatccatcaccactcccgtctaatttttgtatttttagtagagacagggtttcaccatgttcgccatgttggtcttgaactcctgaccttgggtgatctgcctacctcggcctcccaaagtgttgggattacaggcatgagccactgtgcccggcccctcaaatttttaatagacacaattggcaagaaacgtcacgtgcacaagcaagtggtaagaaacttcaaaccattttctacaagcctttaaaaaattataacaggtgaaattatgtctaaggaccccaacttctttattcattaacaaatataagtttcaaaaattgttgtaatgatgtaaatggctttttgaatccagttgagtgttttcccatcaggcacttcaaatgataatgatgctctaatttgcatgcattgttggaggagtcatccagttgctggcttgatccctgctaaaagagcataccagctgcaaattgacagaagaatctgatacacgtgaagatggggacttggaggctttatctggagctgcagctaccaggagcccccttctggtcttctccaagaactgcaccttggcttcatggccttaccttggcacctggaacatggactccttcagtatcttccagtacctggatccacagtgacacaggatgttcgtggtggacagcgagtgtcagacgtagggatcaaagacacacctccagacctcactccatactggccaccccgacaggagccttggatgaggctgctcatggctgtagatgacacaccaaggaactagagcttttcagatgccacctggccactcctgttctcggccatagcagtgttacttggtactgtcaatgtccactgcattctgtcaaatgtgtgtcatttaaagaccacaagacataacaaaaattaattcgttaaaacttattgtattttattttttaaactgagatagggtctctctctgttgcccaggctagagtgcagtggtgcaatcacagctcactgcaacctcaaactcctgggatcaaacaatcttcccgcttcagcctcccaagtagctgggactacaggtacgtgtcaccacatcgcgttaattttcaaatttttaggagagatgaggtctcactatgttgctcaggctggcctcaaactcttgacctcaagcgatccccccgtgttggccttccaaaatgctggaattacaggtgtgagccaccatgcctggcctaattttgcttacacacacacacacacacacacaagaaaattgcaatttcaggagccatgacttatgacatcattgattcctgatggggcagctcaaaaaaaacaaaacaaaacaggaccataagatggcagtattgcataacaagctttactgcacggcacttagataggtttgcatgcggggaatgtcccttccagcaggactccttccagaggaactcctgggacagaggagagttagaggcagggcttaagtgtctaggtgatgtcattgagtagcaaggtggggagagtctgcatcatagaactctgaaaggcaacaataatttggggtttcttatggctgtaagatttttcttctctgtgattaataggtgttgttgggtgcaattttatggggtatgcaaagcaggtgggctctaaatgactaaacatatgcttatttgtgcaatatttatagcaatggattgtgtgagaatttgagcttggtgctggtgggctttgagctgagaggtccctgcctgcctgctgtaaagaaataaatgagatagggctgatagaaagacactgtctttggctcacttatacagcaagtgacaaccaatttagttcagacctttcttgcttctagacctgcaccatccactcttatccacttctcattcttcctggaagctgccacggaacatgcagacccccgtatccacttttgccagtagggacacccacttttgaaaagccacggacccctggcaacgcagctgcagacataccatttaactcaccctgcctggaaaaggaaagtaaatgttttcttcccaatttttgctagggaaatccaggcacatatatgtattcagtaactcaatgatataaatttcagggcttgtgtctgtgtgttattggaaaagcatttgaggctggctgtcatggttcatggctgcaatctcaacactttggaggctgaggcaggaggctcacttgaggccaggagttccagaccaggctggacaactctacctctacaaaaaaataaaataataagccccgcatggtggtgcacacctgtagttctagctactcaggaggctgaggtgggaggattgcttgagcccaggaattcaaggctacactgagctatgatcacaccactgggcctgggcaatggagtgagattctgtctctaaaaaaaaaatgcatttgagaattttagcaaatctaagtacatttggagtctgctaatattactgtatatgggattttggtgggaccatccctaaggatttaataataaaatgtccctttatattgttgagaattttaaataattctttaaagcagttatgttctgataaatatttaataactggctcttgagtggcatggggcgctgatttgcagtgtttgccaattcctgtggtgtaaatactcccactgtggctgatttcaaggtacagatgtgataccactgaatgtgaagctgagaagagatgcatgcaattggctctgactcatgcggttgatacatgccagctccagcacatcatgacttcaagctgtcccagatgtgccctgtctgaatttctgacctacaaaaaccacgagagatgatgagtgattatcaatgttttaagctgctaagtttttgagtaatttcttgcatgctggaatactatacagctgtgaaaaagaatgagaaagggctatatcgtagctatgttatctatgagggatatattatagatatgtcatctaattcttttttacagctgtatagtatcccagctgtgaaatagaatactatacagctgtgaaaaagaatgagaaaaagacaaatacctattatagcaatttgacctcacccaacggtgagagttcattatgtaataatatcggaccaatccagttcaatttttatgtaacaaagttgtgagttgtcttccagttgccatggaccccaggttgcaagctacataatcagaacatgtccagatgagctaaaaagtcaaccacaggtggaacctaagtgctcagacaaaggagcagaattgaattaagaaacagacgccacatggcaatgatccagtatccaatcagctcgagccctggcatcacaccatcgcaagagccaatcagataatgcctcattaccctgtgactataaaacctgccccaactcccagttcaaagagacagatttgagtgttttctcccattttcttgccaattggctcacattaaacctttctcactgcaaaaacatagtgctttgctggttgatgttcccttgcatataggcaaattgatccagtttggtttgtaacagttacatatgaggctttgactctgt[135 bp omitted]gcctcagcctcccaagtagctgggactacaggcacacgtcaccacgcccggctaatttttgcatttttagtagagacagggtttcaccatgttcgccaggctggtcttgaactcctgacctcatgatccacccaactcagcctcccaaagtgctgggataacaggcgcgagccaccacgcccggcctcaagtcagtctttcttccctgcttctgttcaattcattctgacctcctccacccacccaggcagtgaatgctgcttactgatggagagggggccagaaacagaaatgataaggataccagaactgtggagtcatgttggagggaggctggtcccaagagaaacctttggattgggtgcaatggctcacgcctgtaatcctagcactttgggaggccggggcaggtggatcgcttgaggtcagaagtttgagaccagcctggccaacatgatgaaacctcgtctctactaaaaatacaacaattagcttggcatggtgatgcatgcctgtaaccccagctacttgggaagctgagacaggagaattgcttgtacccaagaggtggaggttgcagtgagctgagatcgtaccattgcactctagcctgggtgacagagcaagactttgtctaaataaataaagcagtaaacaaaagaggggtgttgaaattcctcccatgagtaatccattggatatgtgaatatattttattaagtttttttttttttttttgagacagagtcttgctctgttgcccaggctggaatgcagtggctcgatctcggctcactgcagcctctgcctcccaggttcaagcaattttcctgcctcagcctcccgagtagttgggattacaggtacttgccaccatgcccaactaatttttttgtatttttggtaaagatggggtttcaccatgttggccaggctggtctcgaactccttacttgaactcccacctctgcctcccaaagtgctgggatgacaggtgtgagccaccacacccagctctatttttatttttaatatggcaaaatacgtataacactaaacttactaccttaaccatttttaagtgtatagtcataaaaattttaatttaaatactcacataggcttgtagctactatattggacagggtcaatttccaattttttccctgagttagtaagtcacctcgtccatgcgtaattcatcactcttttatcagctggacttttgagacttagaaacaatgactttttttttttttgctgctgtattacattgaggcgtataatatttgatcaaattatgttgttagggtctggcgcggtggctcatgcctgtaatcccaccactttgggaggccgaggtgggtggatcacctgaggtcaggagttcgaggctagcctggccaacatagtgaaaccccgtctctactaaacatacaaaaattagcctggtgtggtggttggcgcctgtaatcccagctactcgggaggctgaggcaggagaatcacttgaacctgggaggcagaggttgcagtgagccgtgatggcgccattgcactccagcctgggcaacagagcgagactctgtctcaaaaaataaaattaaaaataaaagaaaagaaaatagaataataaaataaaataaaataaaatatagttgttagaataagaagcacaactggcataaacaggtttgggaatacacagcttgcactcagtgagcacacagcgagcctggtatggaagtggatgcatgtacatttcagagcaaccctgcaaggtttccgtatgaaccagcgaccatgcatcctctgtgggggatagaccttgggttcatggatgagttggttaattgggtgtcttggaggttggctgagagctcccactgttcttgactcttaagacaagatggcacatgaggtgaaagcaggtgccccagtggaggatcctagaaccagccaagtagtgaggatccaaccgcccccttgcccagagaggcaccagtggaggacgcacaggtgactcacactgccagctgagtccccccttccccatttccagtgtaaacacctggattcttttacagagttacccttgagttcactttgcccttggctctgggggaagagagagtctcctggggtctgctggattaggagatgaatgttgccaaatgaatgcttctctttccgcagctgttgcctttatgcaatgccatttctatcttcagttctttctccattaaaatgtgagccatggcctggaatgaacttcatccctctgtgtggaggaagtgtcctcagctgcccagacaggctcagcttcgggtctgtgtaggaagaacccgtggaagggagtggggagtcgagctcaaagactaacagccaagactctgggagagtggtcagctcagagtcctcaggggagggggtgtggggatgagagtccacgttattatgttacctggggcaggtgggataaaggtaagagaaggtaagtggagggattttagtggcatacaacgactgcttttgttgcagagagcttattaggaagcagatgagaggaactgagcttgcaaaaggtttgtttagaggggacccacccttgggatggatactggtggaagggaaagggaagggaagggaaacaaacaggattgggggagacagagagacacagagagagagagagagcatgagaagtccagctgcccccagctctgtagctgggatggtccctgagttgtcctgagatttggggagaggggcccgagattttatgcctccatacagatgttggtggcccggggaagggaacaagaccctggatgaggacgtgccatttggcagatgctgacctgaaggggtggacagcagaggtctgcttccagcaacattcctagaggctggggcacacatctttcatcactgaaaagatctgggtagcacagcagcgtcctcatccttgctgaaacttgtctgggatagctatggacagattttctccaaggagatttacttttccacggtgagagggtgtgtgtgtatgtgattatgtgtctctatgaaggtgtgagtgcatatgtgtgtgtcatactctatgtaactgtgtacatgtgcatgcgtgtaattatgtgcacatgtgtgactgtgcgtctatatgaaggtgtatgtgagtgtatacgtgtgtgtcatactgtatgtaactgtgtatgtgtgcctgtgtgaattaagtgcacgtgtgattgtgcatctatatgaaggtgtatgtgagtgcatatgtgtaagtgtgtgccatactgtgtgtgtatgtaactgtgtctgtacgagtatgtgtgtgtgaatgtatggtgactgtatgtgcaaccgtgtgtcagcatgagggtgtgtgtgcatatctttgggagtatgtgtatgtgtctgtgtgtgtctgtatgagagtgtatatgagtgcatatgtgtgtcataatgtatgtgtgtatgtaactgtgtgtatgaggttgtgtgtgagtctgagcaagtgtgtgcatgtgtgtgcgagtgtatatatgtaattgggtatctgagggtgtgtgaggatgtggggtgtgcaagtgtgtgcaggtgtgaggacatgtgactgtatatgtgactgtatctgcatgagggtgtgtgtgcctgtgtgtatttgtctgcatgagggcacacaggagtgtgtgtgtgagattatgattatgtgtataattaggtgtctatcagtgcatacgtgtgtgagtgtatgtaactgtgtgtctgtatgagggtgtgtgagtgtgagaatgtgtgtgcatatgtgaatgggtgtgcgtatataattgtgtgtgtatgagggtgtgtgagtgagaatgtgtgtgcatatgtgagtgggtttgcgtatataattgtgtgtctgtatgagggtgtgtgagtgtgagaatgtgtgtgcatatgtgagtgggtgtgcgtatataattgtgtgtctgtatgaggctgtgtaaccatgtgtgtgcatatacgtgtgtgggaatgaatatatgtagtcatgtgtccatatgagggtgtgtgtgagcacgtgcgtgcatatgtgtgtgtaattgtgtgtctgtatgagggtgtgtgagagtgtgagcatgtgtgtgcatatgtatgtgtcttggaggttggctggcagcgcccacatatgtatgtgagtgtaggagtgtgggagtgtgtgtaattgtgtgtccgtacgaggctgtgtgaccacgcatgtccatatatgtgtgagtgtgggaatgcatatatataattgtgtctgtacgagggtgagagtgtgagcaagtgtgtgcatatgtatgtgaatgtgtgagtgtgggtgtgtaattgtgtgtctgtatgagggtgtgtgtgaccatgtgtgtccatatgtgtgtgtgcatgtaattgtgcgtatgagggcctgagcaatgtgactgtgtgactgtcacacattgtgtgtctgacagtgtacatgtgtacgaaatgggatgtctctataatgaggcacgtgtgtgactgcatatgtgcatgactgtggatgagtgtgcatgcatgtaatcatgtgtctgatagtacatgtgactgtgtgtgcgcatgtgtgtgtgtgcgtgcctgccagtttgtgtctgtatgaaagtatttgaattgtgtgaacaggtgtgattgtgggagcatgttatgagtgtgagtgtatgtgagtgtgcttgtgattgtgtgcccatgggaaggtctgtttgtgtgtgagtacctgtgcacgtgagagtgtctgagcgagcgagcgagcgtgtgtgcaacttgcataaatctgtctggcaccagcaaagtggctcaactgtctttagagacagaggtcccttccctcctgttggggacctcttgacctgctccctcccctccagcttcacccctgtccaaggaggctgctcctgatcccaggattctactggatggggggttggggaagggtgtcacctcctttcctttataggcatgaccaggcatggcccccaccacttatgcccacatcccacagggcaggatgtagtcacatggacacgccatgcagtcagggggcctgggaaacattctctctctttaggtgagagctctggggaagaagggctgaatggacattggtggacactggctgtcctggcacagctgcccaggtgctctgcagagtagatatttgtgaaacattaagaaggccctggtggccaggtgcggtggctacacctgtaatcccagcaccatggaaggttgaggcgggtggatcacctgaggccacgaggtggagaccagcctggccaacatggtgaaaacccatctctactaaaaatacagaaaattagtcgggagtggtggtgcatgcctgtaacctcagctacttgggaggctgaggcaggagaatcgcttgaacccgggaggcagaggttgcagtgagccaagatcacgctattgcactccagtctgggcaacaagagccaaactccgtctctctctctctctcacacacacacacaaaaggccctggagacaaaggaacactccttgtccttttctcctggcacagcacaagattctgttgctacatctttatttactgagcatctagtatgtgctgcacctggcactgttttgtcttttttgttttgagacaaggtcttgctctgtaggcctggctggagtgccatggtaccatcacagctcactgcagcctggaactcctgggctcaaacaatccccccacctcagcctccctactagctgtggttacacttgcgcaccaccacgcccggctaattttttaaatttttctgtagagacggggtcttactacattgcccaggctggttttgaactcctggcctcaagtgatgctacggacttggcctcccaaagtgctgggattccaggcacaagccactgtgcctggtagtggacattgttagcagtgactaaagcagagaacgagaagggggaggccgctgtaaacacatgaagacaggcagcgtaagagaaagtcacgagggcaggaataacatccaggcatacttcagatcccagctcaagaaaccactcccaggccaggcgcggtggctcacgcctgtcatctcagcactttgggaggccaaggcgggcggatcacaaggtcaggagtttgagaccagcctggccaacatggcgaaaccccgtctgtactaaaaatacaaaagattagccgggcgtggtggcgggcgcctgtaatcccagctactcgggaggctgaggcaggagaatcgcttgaacctgggaggcagacgttgcagtgaactgagatcgcaccattgcactccagcctgggtgacagagcaagactcccgtctcaaaaaacgaaagaaaagaaagaaaccactcccagactccctgcctgggcgggatcctttgatcaagccctcaacatgccttggggctctcttcacaatggtaagtttgcatttgtttgtgtgattctaggcctcctcttattttcttgaacaggcctcatctggctttgttcatctttatgtctccagcatccagcacaatccctgccattagggtcatggcttcataaaaacgtcacgaatgcaacgcagaagtgcatgcatgcatgaataaatgaatgatgcatgaaaagagcaatctccctgtcctggaagcagcttcccctaggggtgggggtggggtgcggaggcaggggcagccagtgatgtcacaagaggtggctgggatggaacgttctggaaggttgaatggggtagaaggcctgttgtggagggaaaccacccatcctcctgcctcccaccaccaccatcatcctggctggacggagagggtgacgggggctgggaaggggcagctcatgttcaggtttccaggaggggctacctgttgactgtctttgcaggaagaagaaaacacctgagtgaccagatgtcccagctccaggtgccttgccagatggccagaaccacacctcttgaagagtgacaggtgccagtggtatgggagaagggcatgcgttttcttttcttttttttttgagacagggtctcactcttttgcccaggctatagtgcagtggcacgatctcagctcactgcaacctctgcctcccaggctcaagtgatactcccacctcaacctcccaagtagctgagattacaggcgcctgccaccatgtccagctaattttttttttttttttgagacagagtcttgctctgttgcccaggcgcaatctcggctcactgcaagcttcgcctcccaggttcacaccattctcctgcctcagcctcctgagtagctgggactacaggtgcctgccaccatgcccggctaattttttgtattttttagtagagatggggtttcacc[135 bp omitted]taccagccaggctggtcttgaacttctgacctcaggtgatccacccgcctcgacctctcaaagtgctgggattataggcacgcgccaccatgcccagctaatttttgtatttttagtagagatggggtttcaccatgccagccaggctggtctcgaactcctggcctcaagcgatccacccgactcagcctcccaaagtgctgggattacaggtgtgagtcaccacatctgaaccctacatggccttttaaaattgtgaaacatataatgcatataaaataacacaaagcatatctgtacgatttaatgaataacgataaatatctgtgtgcccttttcacttcgtgaaatcgaatattactagtaacttacaagtcctctgtagagaactcctgagctcaagtgatccacctgccacggcctcccaaagtgctgggatcacaggtgtgagcctccgcacccggccgatcgtgtgatttttaacgtgcagttccctgatgaccaaagctactgagcatcttgtccaggatttgtagccctttccaggctccttttttgtgaactgcctgtttacatttttcatcataaaacactgggttgtttacatttgtcttttaaatccagagttcttttcatactccggatactaattttatttgcccattttgcattgccataaagtaatacctgaagatgggcaatttataaagaaaagaggggcctggtgtggtggctcacacctgcaaatcccagcactttgggaggccgaggtggcggggttggggggggggggggggcttgcttgaggccaggagttcaagaccggcctgggcaatatagcgaggcccccagctctacaaaaataaaaataaaaataaattagccaggcgtagtggcatgcttctgtagtcccagctatctgaggggaagagagttccaggcagagggcacagcccgtacgaaggccccaaggaaggactgcacctggtgagttggaagaacagtgaggaggcccacgtggctgcagcagagtgaggagggggagggaggaaggaggagagcacagggaggtgcagggccttgtggaccgtggggagaacttgcgcttttacctggagggaggtgggagccatggagggctgcaggcagaggagagacagggttgggccagcatttcacttttttatttttatttatttatttatgtatttatgtatttatttatttatttatttttgagatggagtttcactcttatctcccaggctggggtgcagggcgagatctctgctcactgcaacctctgcctcttgggttcaagcaattctcccacctcaacctcctgagtagctgggattacaggtgcctgccgccgtgcctggctaatttttgtgtttttagtagagacagggtttcaccgtgtgaaccatggccaggctggtctcgaactcctgacctcaggtgatccacccgcctcggcctcccaaagcactgggattacaggcatgagccaccatgcttggcattcatttttatttgtaaacacttttatcgtggaaagtttcaaacacaaaagtagagctgatcataacataagcccccagctacctatcactcggctccaacttaaagtcagccttggtcatttctgtgtcaccccactcctcgtgggtagttttaaagcaagcaccagacagtgtgttctttcatgcatgaatcctttggcaacaaggattcctttctctaacttcaccccaaagcaattatcatactttaaggaagtaaacatcccctcttcatttcttcatgtcgtctgagacacagtcagtggtggagttcttggcggcctcgtgcacatcttgtttgaattgagatctagcagaacccacaatgcgcctgggtgatgggcctctcacgtgaccaggacctctcaggctcctgggaggaagcttaggtccaggcaggcggagagagtggatcccattttgaaggctgagctgatggaattagctaatgagtcaatgtgctaggaagagagagggagagagagaggggaagggggaagggggagggagggagggaaagaggaaggaggaaaaggaaggaaggggagggagggagggaggaaggaaggaaagaagggagggagggaaggaaagagggaagagagagggaggaaggaaggaaggaaggggaggaagaaagaaaggaagggaagggaagaaggaagaaagaaaaggcagggacggagggaggaaggaagagaggggaagaacgaagggaggaaagaaggaagggagggagagaggaagggtaggagaatgggaaaaaggaaggaaggggagggaagaaggaagtagaaaggagggaagaaagggaagaagcaaagggaggaaggagggagggaaggaagcaagtcaaaggtgaattaaggatgactttgaggttctgggccagatccagctgctccagaggggccttgggcttcctcctcatttcttcttgggccgcacactccgtgcatgtttttcatgcatatctgtagcttggtctggatctgctgttttgggctgctcgctttgtcctgctgattgatctactttgtgtgtgtaaactccgtaggctcattcaagttcactttacttatttttaaaattaaacttatttttttttttttgagatacagttttgctctgtcacccaggctggagtccaatggtgctatcttggctcactacaaccttcacctcccaggttcaagggattctcctgactcgacctcccaagtagttggaactacaggtgtctgccaccatgcctggctaattttttttgtatttttaatagagacagggtttcaccatgttggc[142 bp omitted]acaaaatcagtttttgctggtgtaagaatcacgtgcatgttacagggcttcattcaccagagggtttactcaagttttcacctgctgtgttcctgcactcactgatggaaacttttagagttcataaaacattactgcaaatctagaatccagaacaactgcttgattcttgtgtcaagcacgctctttatcatgaacaaaatcgtacaattttcctccctgaaagccactagaaaaatcagtttcaataaatgttgaccaacaatttggcctccacttcccccaggggacaaagttgacaatatctggagacatttttgattggaa[132 bp omitted]gaaactctgtctctactaaaaatacaaaattagccaggcataggctgggt[134 bp omitted]gcgtggtggtgggcacctgtggtcccagctactcaggaggctgaggcaggagaatggcgtgaacccagaaggtggagcttgcagtgagccgagatcgagccactgcactccagcctgggcgacagagcaagactccgtctcaaaaaaaaaaaaaaaggaattaacacactgagaattaaacaacctgaaggagtggtggtacaaacaccactccaaagccctcaaacagtagagtccaattaatgactatgcaaaaacccagggtagccccggaatcctgtccgctactgatgggttaaagaccatgtgatctcggccaggcgcaatggcttacgcctgtaatgccagcactttgagaggctgaggcgggcggatcacttgagcttgggagttcgaaaccaacctggctaatgtggtgaacccttgtttctactaaaagaatatttttaaaaattagctgggtacggtggcctgtaatccctgctactccggaggctgaggcacgagaattgcttgaacctgggaggtggaggctgcagtgagccgagattgtgtcactgcactccagcctaggcgacaaaaccaaaccaaaccccatgtgatcttaagtctgattactgataagtgttttcgaaagaggtggcattgatttttaccacgatgaatgagagcacctgttttcccacattttcataatagacaatattgtcagcttttttgatcttacttaacctgaaaggtgaaaactgcatcatattttctgttgtatttctcataggactgagtttgagcatgtttacttctttttaaaagtcatttttcagtttcagataattatctattcatgtcctttgcccgctttcccattgggttttggtctttttctgattaattcctcagggttctttacatatgagggaaatcaagcttttatactttggatgtattgtccacatctttccccaatttgttgttgatctcttgatttttgtttgtggtattcttggccatgtggaaaatttaaaaattttatgtagcaagacttatcctgtttctcctttaggccctttgagttttcatgttaatattacctttaagagaagataaatgtgtggtcccatgagagtttctttcccctgggaggcttcaaaatattttctcacccacagaattgtgtatagacccagactttatattctaacaatttaagagactcttctgtaaactcacagattgaataccctctgggttttacaaatgctctattatctggcatgccggccactctcctctcctcccaggcccaggacaggcatgaccaatggatcctaggattctaggcagacatgaccagtggatggaagagttggcctcatccctacagcccctttgccaatcctgttaaactccctgcttttttgctttgcagtgctgtggagcatggtttctgcacacctggaatgactggaaccccaaagactcaagaaggagctaaagatcttgaagtagacatgaataaaacagaaggtatattgcactaaagagtacgtgggagagagagtggcacattgattccacaaaggctctttgcagaggagtctggatctagaaagatgtagccattccttgcctgaccctgctgaccccgaccccccacccttttgttttgagacagggtcttgctctgtcacccaggctggagtgcagtggtgcagtcatagctcactgcagccttgaccttccaggctcaagtgatcctcctgcctcagccctccaagtagctgggactacaggtgcacaccaccatgcccagctctgtattttttttgtagagacagggtttcgctatgttccccaggctggtcttgaactcctgggctctagcaatcctcccaccttggcctcccaaagtgctggaattacaggtgtgggccaccgtgcccagcctagggcctattttctattcttgataggttgttgaggtagcagggcaagttgttcacataattcagagctctgctctactggtgatgtgacactgggcaagtcacttgctctttggaggcctcatttgcatatctgaatgatgggggcattgataacagcacctccctgtcaggttggtgagcccgagtggataaagtacccaggaatcatccatgtagatagggtgcggatatgatcatagtgatttattaacattaggctataatcattttactgtcagagctaaagtcaagggacatggtgacatcatagacagctctgataccagtgggttgggggaggtccccaaacgccggtgggacctcgaacccagccattatccaggctcttgacaccatcgagagtgaattcaagaaacaagtcagaaaatagtgaaagtgggccggg[133 bp omitted]ggtgtggtggcgggtgcctatagtcccagctattcaggaggctgaggcaggagaatggcgtgaacccggga[137 bp omitted]tacacattcaaggagagggagtgcaggcgtgcttgaaagatagcatcacacacaaaggagtttggggatgctacctttatgggtccaaagggtggaatattcatctaaatccctagaaaactggccgggcacagttcacatctgtagtttcagcactttgggaagctgaggcgggcagattgcttgaggccaggaattcaagaccagcctggccaacatgacaaaaccctgtctctcttaaaactacaaaaattagccaggtgtggtggcacatgcctggattatagtgagtctcaacttattgcaacctctgcctcccaggctcaagcgattctcatgcctcggccacccaaacagctggcattacagtcatgcaccaccgtgcctggctaattttttttttttaacaaagcgccccaaagtgggtgtctgaaacagcagaaatgtattgtctcacaattctggaggccagattactgagatgaaggtgtgggtagtgaggttgcagtgagccaagatcacaccactgcattccagcctgggcaacagagtgagactctgtctcaaaaaaacaaaaacaaaaacaaaaacaaaaacaaacaccagtcattggatttagggatcaccctaaatccaagatgatgccatgatgtcatctcaagatccttcactaaatccacctacaaaaaccctgtttccaaatacggtcacagtctgaaattctgggtggacatgaattttggaggttcaccatgtaacccactacagtcattaaaatatcccacaagtgtccaggtgacacctccatgtttttgtccaatttaaagcatctccactcccccctgcttcaggctggggtcaggaaggcatgataaggtgctctttgagttcctagatgctcttctcctcatcacccccatctccccaggtggtttctttgtgagctggtgctgactcccagagctgattagctcgggaaagtggggttgaagggggcctgtatgaactaggcttcccttgttgtaagttgttatgagattaattgtgcatctccaattcctttgtggaagtcctaacccccaggtgctcagaatgtaaccttgtttgggaataggatcattgaagtaatttggtttttttgttgttgtttggttttgttgttgtttttttgttagttagtttgtttgtttggtttttgagatggagtctcgctctgttgcccaggctggagtgcagtggtgcgatcttggctcactgcaatctccacctcccgggttcaagcgattctcctgcctcagcctccagagtagctgggacaacaggcgcgtgccaccacgcctggctaatttttgtatttttagtagatacagggtttcgccatgttagcgaggatggtctcgaacttctgatttgaagtgatccacctgcctcggcctcccaaagtgctggaattacaggcacaagccactgcacccagcctactgaagtaattagttaaaatgacgtcatgaggttaggtcccaatccaatgtgaccagtgtctttataaaaggaggaaatagagacgaacctgcacacacggagaatgtcatgtgaggatcgaagcagagtttgcagtgatgcacctacaagccaaggaatgtcaaggattgccggcaaccgcagctaggagaaagtcattggtcagattctctcccacagcctcagaaggaaccagtgctgcctgcaccttgatctcagacttgtggcctccagaattgtgagacaatacatttctgttgtttcagacacccggtctggggcactttgttattgcagtcctagctaattaatatatcagtcataccagtgtctgttttttttgttgtttttttctttttctttttttttctttgagacagagtctcactctgtcacccaggctggagtgcagtggcacaatcttggctcactgcaacctctgcctcccgggttcaagtgattctcctgcctcagcctcctgagtagctggaattacaggtgccctccaaccacgcctgactaaattttgtatttttaatagagacgaggtttcactatgttggccaggctggtctcgaactcctgacctcaagtgatctgccggcgtcggcctcccaaaagtgttgggattacaggcatgaaccagcctgctgtctgttgatgactatctgaacatacatctccagtccttgggtcctactactggcaccaagccaagagcctttagaagcccatctatgaggcccatgtctagtcaaggggaaaaagtagcatcccggccgggcgcggtggctcatgcctgtaatcccagcactttgggaagccgaggcaggcggatcacaaggtgaggagatcgagaccatcttagccaacatggtgaaactcatctctactaaaaatacaaaaattagctgggtgtggtggtgcccacctgtaatccccgctacttgagaggctgaggcaggggaatcacatgatcccaggaggtggaggttgcggtgagctcgcatgatcccaggaggcggaggctgcagtgaactgagattgtgccactgcactccagcctggagatagagcaagactccatctcaaaaaaaaaaaaaaaaagtagcatcccatcataggtggatgtgcaatttccttccaacacagctgcctactctaccattgccatctaccacctccccagtagaccaggttcagttgaacaaacgcaaggttacacacccaattctccaagagggtctcttggactttctctcacttgcccgttactgggtggtagtgagaaacacacaacaaaccaacaactgtctccagaggaaaccctgttctcttctttctcagtgtcaacccttactcatccccaaaagaagtgatagatacaggaccccaaaactggttttgaattggtccctttgctagttccatttggctgatctgggtgatgtcgctgtgacaggcaaccccctcaacaaccccctcaacaacctcaatggcttaacacaacacaagtgtgtttcttactcatgttgtgtgtctggcattgggggagaggggctacttcttcacatttgctccaccatttttgtgacaggacaatggacgatggggaattatgcaccgggtcttaaatcttctccccatgaacgacacacataactcacttcttatgtttcattggccaaagcatacatagtccactgcatgtacattttacctttaaaaaaatctccgtaaataatattaaatatgtgactcttgttaatgatttacatgcaagggtgtttaagggtaaatggatgaatagctttggctcacttggaaatgcatcaaaaaatcagatggagccaggcgcggtggctcatgcctgtaatcccggcactttgggaggccgaggcaggtggatcacttgacgtcaggagttcgagaccagcctgggctacatggtgaaaccccatctctactaaaaatacaaaaattagccagatgtggtggcgggtgcctgtaatcccagctactcggcaggttgaggcagaagaatcgcttgaacctgggaggtgtaggtcggggtgagccaagatcacgccactgcactccagcctgggcaaaagagtgagactccgtctcaaaaaataataataggccaggcgcggtggctcatgcctgtaatcccagcactttgggaggccaaggcgggcggatcacctgaagtcgggagttcgagaccagcctgaccaacatggagaaactccatctctactaaaaatataaaattagcgaggcgtggtggtgcatgcctgtaatcccagctactcgggaggctgaggcaggaaaaacgcttgaacccgggaggcggaggttgcagtgagccaagatcgtgccattgtactccaacctgggcaagaaaagcaaagctccgtctcaaaaacaaaaacaaaacaaaacaaaataataataaaaaaaataagatggggccaggtgcggtggctcatgcctgtaatcccagcactttgagaaactaagggaggaggattgtttgagcccaggagtttgagatcagcctcggaaacacagtagaaccccatctctacaaaacattaaaaaataaattagctaggcatggtggtgtttgcctgtagttccagttatttgggaggctgaggtgggaggatggcttgagcctaggaggtcaaggttgcagtgagctgtgattgtgccagtgcactccagcctgctgacagagcaagaccgtgtctccagaaaaaaagaaagaaagaaaaaaaaaatggacataacaaagacagcaggatagatgtgtgataaaatatggtaaaacgctagcagttgtagaatctaggtgttggataagaaagtatttggtatacaatccttttgactattaaaatttggcggggcggggaatgaaaaaataaataaagagaaaggaagcttgtcttgccagtgttgaccacataacttcaccctagaaggggattaattcaactctcagcaccttaggtccaaaaagacaccaaccgccccccgtccaaagttattaaataaataaaaacatttgccacccaactctggtgactatttgcagttactcccaggctgtggaccacctgtcgagatggagaagtccttctgaggctatccaaacacggaccaggccatgagaccccgatgaccatccctgaattttttcgagagtcagtcaaccgatttggaacttatccagccctcgcatccaagaatggcaaaaagtgggaaattctgaatttcaaccagtactatgaggcttgtcggaaggctgcaaaatccttgatcaaggtaagattcattcattcattctcctttgttcaaccattcattctgaataggtaacagacatacatacatgtggtacaaaattcacaaggcaccaaaagatacaaaggttaattggcgaaaatttccctctgattcatgagcctcagccactcagttcctctctgtggaagcggtcaccattgtcagttttttgtgtgtccttttgggaaataaattatgcataaatataaaatgaaatttttatatatgcaaattttttacacacataatagcctactacacccatggttctgcatcttgcatttgtccctaacatactatctctatgtttttgttagttgctgctgcataacaaattatcccaaaatatagtgacttgaaatgacaaacatttatcatctcacagtttctgtggattgagaatttaggagctactttgaaattgggttcttctggctccaggtctctcatgaggttgcagccaagctatcagctggggctatctcatctgaaggctcaactggggctggaggcttcacttccaagcttacttacctagatgactggttgttggcaggaagtctcagctcctcattccatggccttctccacagaattgcttgagtgtcttcacggcatggttgccagtcacccctagaatgaatgaagcaaaagaaagagggaacaaggctggggtcagtggctcatgtctgtaatcctagtgctttgggacatcgaggcaggaggatcactgagcccaggagttcaagaccagcctgggtaacatagtgagaccccagtctcaatgaaaaatttaaaaagtagccagatgcagtggcacatgcctgtagtcccagctatcaggaggctgaggtgggaggatcacttgagcctcggaggtcgaggctgcaatgacctgtgattgcaccattgcactctagctgggcaacagagtgagatggtgtcataaagaaaaaaaaaaaaaaagagaaccatgtgcttgggctgggtttcttcttgggggccccaccttcatactatgttgctgtggctagttcatctctcctgaaagatggtctcctttagccatgttcttagttccgtggagttaaaggtccccctcctcccgtaaatcttggacacctgactgagcacggtggctcatgcctgtaatcccagcactttgggaggccaaggtgggcggatcaaggtcaagaggtcaagagtttgagaccagcctggcccacatggtgaaaccccatctacactaaaaatacaaaaattagccaggtgtggtggtgcacacctgtaatcccagctactcaggaagctgaggcaggagaatcgcttgaacccgggaggcagaggttgcagtgagccgagattgtgccactgcactccagcctgggtgaaactccatctcaaaaaacaaacaaacaaacaaaacttggagaccgaagtagaaacaaaaccaaaaataaaaacaaacaaaactacttggagacccaagtagaaattagtcggtgtaactaggcattaataaaaacacactctgtccacaataaagccagccttttggttactgaaatacttggcatctcattctgaaggaccagcaggcaaatgccttccaaatggttccttttcccccaagaacagcagatcattgccagccgtgatcccgtatgactaaaagagccaacaacgttggttggcagtacccagaacaaagagggagttttcccctaaggatgctcacttttgtttctgagtttcctggttcattctcacccacattcagaacaagtctgtacctttacatgtgcaacttttttttttttttttttttttagacagagtctcactctgttgcccaggctggagtgcagtggcacgatcttggctcactgcagcctcagcctccaggttcaagcaattctcctgcctcagcttcccaagtagctgggactacaggcaggtgctgccacgcccggctaattttttgtatatttagtagagacggggtttcatcttgtgggccaggctggtctcgaacttctgacctgaagagatccacgtgccttggcctcccaaagtg[210 bp omitted]cagctactcgggagggtgaggcgggaggattgctggagcctgggaagttgaagctgcagtgagctatgatcacccactgcactccagcctgggtgacagagcgagacaaaaaataataataataaaataaaataaaataaaataaattcacacctttcaagatagctattctttaaaaaatagcaaaacacaacacgtgttggggaggatatggagaagctggaacccttgtgcagtgctggtggaaatgtaaaatggtgccgccactgtggaaaagtctggcgatttctaaaaaaagaaaaaatgtaaacagagaattgccatatgattcagcagtctcactcctggatatttaacaaaaaaaaaaaaaaaaaaggaaagccagagacatgaagagttatttgtagactcagggtcatagcggcgttattcacaagagacagagggtggaagcagcccgtgtgtccatcaatggaagaatggataaacacgatgtggtccgcccatacaagggaatatgattcagccacaaaaaggaaggaaattctgacacatgctacaacatggatgaatcttgaggacatcatactcggtgaaataagccagacacaaaagggcaaatcccgtatggtttctttcctaggaggtccctagagtcgttagactcatagagacagaaagtagaatgggaggtgccaggggctggggaaggggatagagagtgagtgttttatacagagagtttcagtttagaaagaggagaaagttctagagatgaacagtggtgacggttgtacaaccatgtggatgtgtttaatgccactaaactacactcttaaaaatggtcaaaacgggctgcgtgtggtggattacaggcgtgagcactttgggaggctgaggcgggaggattgcttgaggtcaggggttcgagaccagcctggccaacatggtgaaacgctgactctactaaaaaaacaaaaattagccaggcgtggtggcgcgtgtctgtaattccagctacttcggaggctgaggcaggagaatcgcttgaacccaggagacggaggttgcagtgagccgagatcgcactgctggactccagccttggcaacagagtgagactctgtctcaaaaaaaaaaaaaaaagaaaatggtaaaatccatgttatagatattttaccacaataaatgaaacaaaacataaaaataaaaataataaatggtgtgttatgtagagggaggtaaacaaacctcccgtagtcataaaaattaaaaatattacacctcagattttaggctcaatgctgtctcccaccccgtgtggctacttttgttttgttttgaaacagggtctcaatctgttgcccaggatggagtgcagtggtgcaatcatagctcactgcagcctcgaactctagggctcaagtgatcctcctgcctcagctacccaagtagccgggacgacaagtgtgtaccaccatgcccggcgaacttttccactttttttgtaaagacaggggtctcactgtgttgcccaggctggtctcgaacttctggcctcaagcaattctcccacctcaacctcccaaagtgctaggattacaggtgtgagccactgcgcctggcctccatgtgactacctttgattctgtcgtcacatatcctaatgatataacatctctgtgtttatgttttgtttttctgtttgctttttccttcccagctgggtttggagcgtttccacggagttggtatcctggggtttaactctgcagagtggtttatcactgctgttggtgccatcctagccgggtaaggtcattggcttggttcatggtgagggttaaggagccgctaccctgggcctgggacccctgggcttgtccagtgtgagatgcaaacaggaattttggatgaacgccctagttagcaggcaggatagatgcacgaacaaatcattctgatcacaggtcatacgcaataacacccattagactagcagtctcagacctctcgattttcttcagctgaagaactttttgcagacaaaataataattgtagatagcatttagaggtttctgattatgtgcagaagcattgtgctccacgtgtatgatcctgtaaaacctcacgacagcaatgtgaagtgggtcctatcatcccctatctacagatgaggaaactgaggctcacacagccagtgggcagccttgaagtcttgggctcatgcgatcctcccaactcggcctccagggtaactgggactatgagcacacaccaccacacccagctaattttttttttttttttttttttgagacggagtctcgctctgtcgcccaggccggactgcggactgcagtggcgcaatctcggctcactgcaagctccgcttcccgggttcacgccattctcctgcctc[168 bp omitted]gatggtttcttgctatgttgcccaggctgtaatcgtgaaaaaaacaaaagtaaaaataaaatactgatttcttcttgagcttgtaattctacctttgggagttttacttaaagaaacaaaaccaaaacatgaatatattttggcttatgcacaaagatacttcttggaagtgttattagtgatggcaaaaagtcggggacaacctaagtgtcccacagctgtggattaaaccatgagatgccttctggatgggattctcggtaatattttgaaatgatggctctgaagagcacattttaagcatttttgatgtcagaggtgacaaagcaggtatcaaaatctttatacactgtatggttacaactatgcttaaaatttaaatatcaggccgggtgtggtggctcacgcctgtaatcccagcactgtgggaggccaaggcaggcggatcacaaggtcaggagatccagaccatcctggctaacatgctgaaaccccatctctactaaaaataccaaaaaaatcagccaggcgtggtggcaggtgcctgttagtcccagctacgcgggaggc[144 bp omitted]atataccaattattgctggtcactcttacctatatgatatcattgactgctcatggtagccctttgaggtaggtgccatcatgatcccaagtaataatgatggtgacgataatctgggaccaatagaggttaagtgtcttccccagaatcatgctgtggttggataaagaccctgagatctgaactcgtttgttcgactcaagattaataataacaacagcaacgacagcagcagcagcagccacggccatgacaaaattgagcggctgggcacagtgactcatgcctgtaatctcagcactttgggaggctgagatgggaagactgccttagcccaagagttcaagaccagcctggacaacatcgcaagattctgtctctaaaaaataaaataaaagtgtttttaaaattagccaggcatggtggtgtgtgcctgtagtcccaactacttgggaggcagaggtgggaggatggcttcagcccaagaagttgagactgcagtgaattatgatcataccactgcactccagcctgggcaacagagtgagaccctgtctggaaaataaaagtaaagaaaagaaaagaaaagaaaaggaaaagaaaaaagaaaagaaggaaaagaaaaaagaaaagaaaagaaggaaggaaggaaaagaaaagagaaaagagagagaaaaaaattgagggtggtgactagaaataaatattaacattagttatatctcatcatcgagactaacaccaccctaatatgttatattctattttccaaatttttatgagcatatactacccctgtcttacagtgagttgaaatatatatatattttgaggccgggtgcagtggctcatgcctgtaattccaacactttgggagtggaacacctgaggtcgggagtttgagaccagcctgaccagcatgtagaaactctatctctactaaaaaaaaccccaaaaaattagccaggcgtagtggcacatgcctgtaatcccagctacttggagggctgaggcaggagaatcacttgaacccgggacgcagaggttgcagtgagccgagatcatgccattgcaatccagcttgggcaacaagagcaaaactccgtctcaaaaagagagagagagagagagagagagagagagaaaattattattatatatataaaatatataatacatataataaataatatataatacatataataatatataatatattatattatctatatagagagaggtggagtctcactctgttgcccaggctgcagtgcagtggtgtgatcttggctcactgcaacatctgcctcccgggttcaagtgattctcctgcctcagcctcccaagtagctgggactacaggcgtgcgccaccatggctggctaaattttgtatttttggtaaagatggggtttctccatgttggccaggctggtctcaaactcctgacctcaggtaatccacctgcctcagcctcccaaagtgctgggattacaggtgtgagccactgtgcccagcccagaataaattttaatgaagagatctgtccccattttaggactgaatggtaagacagtgtcatgcagtgattgggctctggtgccacatcagacccaaattcaaatcttgggttgtctgctattttgtattctgtatgaatgagcaggaaagcacacatctccatgcctcacagggctgttataaagattcaataagaggatgcttcataaacccttagcacagtgcttagcaaatagtatgtgcttaagaatggtgatgagagtaaccatctcaaataattataatgtgcctcattccctgccatattaaaagcacaacaactagatcaacagagcagagagcccagaaatagctccatgcatacatggtcactggcttccaacaaaggcagcagagtagttcagtggtgctggaccaactggatatttgtatggaaaaataaatcagccctgatccctacctcacatcatatgcaaaaattaaattgagatggattacagactaaatcatgcaagttaaattctaaagcttctagaaaaagaaaagcacggaatggtttcacaacctgggggtagtcaaagatttcttagacaggacacagagagcaaaaagcataagagaaaaagttgccaaataggactttattagcattaaaaacttctgcttattaaaagacaccaacaagatgaacagttgtcgaacatggtggctcacgcctggaatcccagcactttgggaggcaggggtgggtgggtcactggagtccaggagtttgagaccagcctgggcaacatggtgaaacaccttctctacaaaaaatacaaaaattagccaggtgtggtggtgcatacctgtaatcccagctactcaggaggctgaggcatgagaattgcttgaatccaggaggttgaggttgcagtgagctgagattgcaccactgcaggccagcctgggtgaccgagctagaccctgtctcaaaaaaaaaaaaaaaaaaatggtgaacaggcaaactgcatacttggagaaaatattcttaaaactcgaatttctaacaaaggactggtatctaagatagataaagaaattctgtaactcagtaataaaaaggcaaaaaaaaaaaaaattgaaaggggcaaaagatttcaacagaaatgccacaaaggaaagtagccaaaaggcacatgtaaaggtgctcaatgtcattatccattgggaaatgcaaattaaaagcaaaagaggatgcaccctgcaagcacaaaaggctgtgaatgatgggaacagaggctgagtcaggagttcagatcctaggtctaacacctacttgctgtgtaatcttgagtgacttcactgctgggcccctgtttttctcatctataaaatgcggtgttctaagtgttccatgacctgttgtcatagtgacatcataggagctgtcacttatcatcattgtcatttttgttgtcttcatcattgttaagttggggaggaagggaagctggtgctgtggctgcaaacttaagaacttgcctgcaaacctttcctctcttttgaccttccagaccattctgcctttaaggtgtgtgtggatgcacacacgaatttgttttcttttcccaggggtctttgtgttggtatttatgccaccaactctgccgaggtttgtcaatatgtcatcactcatgccaaagtgaacatcttgctggttgagaatgatcaacagttacagaaaatcctttcggtaaacccctacccagcactgcctgccaaagtcacccaggggtacctcagggctctgggcaggtgttctttttttcccaggtaaattctaatgataagatagggccatgcatctgttcagcgagtcctccatgacctcattagtatatgtggtgaagctatttttggagaagcagactgaaatagaggagtttgatttccaattcatattaacttagtttaatactcagcctccatttttttttttttttcgagacagggtctcactctgtccccaggctggagtgcaatgtcgtgattgtagctcactgtagccttgaactcctggtctcaactgatccttctgcctcagtcctccaagtagctgggactacgagcgtgtaccaccatgtcaggctaactttttttttttccgagacagagtctcgctctgtcgcccaagctggagtgcagtgggctgaactcggctcactgcaagctctgcctcctgggttcatgccattctcctgcctcagcctcccaagtagctgggactacaagtgcccaccatcacgcctggctaatttttttgtatgttttagtagaaacggggtttcacc[140 bp omitted]tcatgcttgtaatccgggcactttgggaggccaaggcaggcagaacacctgaggtcaggagtttgagaccagtgtggccaacatggtgaaactccatctctaccaaaaaatacaaaatttagccgggtgtggtggcatgcacctgtagtcccagctactggggaggctgaggctgaggtggcaggatcgcttgaacctgggaggtggaggttgcagtgagccaagactgagccactgcactccagcctgggtgacagagagagaccctgtctcaaaacaaacaaacaaacaaaaaccattttttttttgtagagacagagtcttgctatgttgcccaggctgctgttgaacttctggcctcaattgatcttcctgcctcagcctcccaaagtgctgggattataggcatgagcccccatgcccaaccttaagcccccacttaagtaaaagtattaatatatttatgtattattttatatacatcccactgctaattattttttcttttagaagtgtgatgatttcaagcccatgctactatataattttcttcatttcttgtcattgtcttcatttctagatgcttttgttgttctcttctatttcttgcctaagttctatcccttcctgtttcatttttttctagtgtcctgctgtctcttccctgagtgcttgtatgtttgctttgtgttcttcctttctagctgtgtttgcttcatta[141 bp omitted]ttcacgtcattctcctgcctcagcctcccgagtagctgggactacaggtgcctgccacca[137 bp omitted]acctggccttggttacaattttcttttgcattgtgttgaaattatccagtgagttttatttgtgtacagtgaaatttagctgctgtcttacgtttttttttttttttcattgtagtgtctttgtatggctattgtcgaaactttaaatttcctacatgtttgaatgagctgcagtttgctgtatcagcttttggcaggagggtcctggagaggaggggagtccctgggaggggtgagcctagatggctaggttcatttcagctcaaggaccactgtgactgtttcttgaatacatgatttcatgactctgagtcactcatttcttcactttttcacatctctggagtcgagatgtgtcttttcattgatggcattctctgatcactactggccatatgttttctcacattttattctctccgaaatttgggtacagtttccagattcaatgaaatcctagctagactcagtgaaatacaacactttctcctgcctggcttcctttgactcctaattcctgacttggttcaggaaggacagacctccacctctggcctagagcttttaaaaattcttttcttttttctttttcttttcttttctttttttgtttgtttttttctttttttgagactgtctcactttgtcgtccagtctggagagcagtggcgccatcttggctcactgcaacctccacctcccaggttcaagtgattctcatgcttcagtctcccaagtagctgggactacaggtgcacaccaccacaccgggctaatttttgcattttttgtcaagactggatttcgccatgttagccagactgctcttgaactcctggcctcaagtgatccaatggccttggcctcccaaagtgctgggattacaggcatgaaccactgctcacaaaattactttcttaagtgatgcatcggtggttcccaaaactcatgtcatacctgtttgtcctcttcctagcagaacacactatggggtgggtgctggtgggtgggtggggtccttcttccagctgggaatgctggcttaatttgagttttccataactggaaaatgccacatacacaaccttcccctctacacccacctggctgctgtggatttctgtcctggttctagcaggtccagcattaagtgaataaagcaatatctgaattatttctgactcctagtttcattgaaggtgaagtctgtggaggatttattgttccagttgctaggtctagaagattcaaaaccaggttcctgacatgcttctcccaaattggatgcccagctccacttggagatctttatttgggggagtaatcacagatcctcctctgcttataatcctctaattctctagcggttttctgttggagttaaataaactccaaactcctcatctttgcctccaaggctccgctgatctgggcctcaccattctttcatgccccctcccctatcatactctcttgggtccccactctggccatcctggactttttgtatccctcagacatcccaagctgttgcctgccccaggctccttgaatgtctgtttcttcttctctctggaaaactcctgtccagctgctatacgggcttctgccatcttttctctccaatgcatgccagaggcgtggttatgattagcaaaatggatgttgcaagtaactttttcattggattggctagaagtgtcatagagagaccccatcccgctttctttggcatgaacagagtataaaaatctcgcaggggccggg[138 bp omitted]gtggcgggcgcctgtagtcccagctactcgggaggctgaggcaggagaatggcatgaacccaggaggcggagcttggagtgagctgagatagcgccactgcactctagcctaggtgactgagtgagactccgtctcaaaaaaaaaaaaaaagaaagaaagaaaagaaaaaagaatcccgcaggtcacctgaaccttaccgtgctaggtatgggtagagggctctgcacttgtccaggttccagccaacttcatgaaggatttttattgcctgactccgagtaaaaggttagctaaatctgggctgcaaggtgcaaagtcctggaaaaggaagagccatgagggacttcttttagctcatcaaccaagatccacaattctgtgtagcataatttggtcagagatgtgttgtctcgggcagactattgtcatcctctaccgacactgttggaagctactgatatggactacaaagaatccaggagtcctgaaaccaagtcatttggagtcagtcaagaccaatagca[145 bp omitted]accccggctctactaaaaatacaaaaattagctgggcatggtggcacatgcctgcaatcccagatactcaggaggctgaggtgggagaatggcttcaacccgggaggcggaggttgcagtgagccgagattgggccaatgcactccagcctgggcgacagagcaagactgtgtctcaaaaaaaaaaaaagaggctagagttgctggagagagcttacttaggacatctaacccagctttagtctttcccagggctgggttgccatgaagcccacagggaactttctttcagattccacagagcagcctagagcccctaaaagcgatcatccagtacagactgccaatgaagaagaacaacaacttgtactctgtaagtgtgggaggtgggcactggggaaaggggagggcggggccttgcaagaaaagtgggcgtggcctaagtggaaggtgagcagagggaggaggtcggacctggcaagggtgggaactctcaaaggaagtaggtggggactctcaaaggaagtgaaaggtgaggaaaggaagtgggtggggccttgtgaggaaagtgggtgtgacctttcaaaggacgtgaaatgtgagcagagggagggggtgtgaccttacaagggaagtgggtgtggcctttcaaagaaagtgggaggtaagcagagatggaatggggcctcacaaatgtggtaggtgggggtttgcaaagggatgtgggtggggcttcataaatgtagtgggtggggctttgcaaagggaagtggatgtggcctttgcaaagggaaatgggaggtgagcaatgcgtgggggcctagcaaaaggacgtaggcgggacctttgggacgcatttttcccttctggcatgaagggactgattaatgaacagtgtctgttctggctaattactgctgggcaacaaatcaccaccaaaactggtggctaaaaaaaatcagtcattttgttattaattttttcccaagaacattaagataattaaacaatatactaaaaagttgaaaattatgttaaaactaacaacattaagtttaaatattttatttatacccaagccaaaatttgttataacaatgactaagacaaccaattagaattgcagacttctcaggagatcgagaccatcctggtcaacatggtgaaacaccgtctctactaaaaatacaaaaattagctgggcatggtggtacgtgcctgtagtcccagctactcaggaggttgaggcaggagaatcgcttgaacccgggaggcggag[186 bp omitted]aaccccgtctctattgaaaatacaaaaaaattatccaggcgtggtggtgggcgcctgtagtcccagctactcgggaggctgagacaggagaatggcgtgaacccaggaggcggagcttgcagtgagctgagatcgcgccactgcactccagcctgggcaacagagcaagactccgtctcaaaaaaaaaaaaaaaaaaaaaattacaaactttttagaggttcaaagtgaccactacagcaacagtcttaagtctcggataacttaaaagactactttgttagcaataacacttacagcagggtttctcaacctccttgctgttgacatttggggcaggtaattctctaaggagctgtccgacgccctgtaggatgttgagctgcattgctggcctccactcactggatgccaggaatatatcccctgcctcccacttgaaacaaccaaaagtgtctccagacactgcctaatataccctggtggggggagggtgggcggtggtggagtagtatcacccctggttgaagacgctaatttataggggagagtcacatagaagggcatctactcctctgcaagggagagtagaacctaccattttaagattctgtttaggctgggcacagtagctcatgcctgtaattgggaggctgaggtggacaaataacctgaggtcaagagttcgagactagcctggccaacatggagaaaccctgtctctactaaaaatacaaataataataataataataataataataataataataataataatcgcccaagcacagtggctcacacctgtaatcccagcactttgggaggctgaggcgggcagatcatgaggtcaggaggtacagaccatcctggccaacatggtgaaaccccgtctctactaaaaaatacaaaaaattagctgggcatggtggcatgcgcctgtagtcccagctgctcaggaggctgaggcaggggaatcacttgaacccgggaagcggaggttgcagtgagccgagatagtgccactgcactcaagcctggcgaaagagcgagactccatctaaaaaaaaaaaggctgggtgtggtggctcatgcctgtaatcccagcactttgggaagccgaggtgggtggataacctgaggtcaggagttcgagaccatcctgaccaatatggtgaaaccccacctctactaaaaatacaaaaattagccgggcgtggtggcacgcacctgtagtctcagctactcaggaggctgagagaggagaatcacttg[131 bp omitted]aaaaaaaaaacagccaggcgtggtggtgcatgcctgtccaagctactcgggaggctaaagaggatcacttgaacctgggaggtggaggttgcagtgagctgagatcacgccattgcactccagcctgggtgacagagcaagactcttgtctcaaaagaaaaaagaaagaaagaaagaaaaagatttagtttaggacccagaaatgagcaaaaacgaatgagactgagaaagtggactgtgacatttgggaaggaaaatggccgagtaagacaatgaactgtgccagttgtgatgcttggcatctgtgtgcccaacagactgaggaccaacccagatctccaagacaggggattggattggaccagcatgggtctggtgcccatcccaatccagtcatttgtggctgtggaagccgggggtcttctaccggcctttgaaggaacaccctttgtagggagacctaggggcatctctgagaaaggacaggttcccccagagggcttgtgtgtgctcttcctctcacccttgccctaccttgttacagattatctgggcaaagggctttgcctgctcagatgaagccagcatcaccctgggcaggtttcaggcaacactggccatctgtagaggactttgaggggccttttttttttttttttgagatggagtttcactctgttgcccaggctggagtgcagtggcgtgatcttggctcactgcaatctccacctccccatttcaagcgattctcctgcctcagcatcctgaggagctgggattacaggcgcctgccaccacacccggctaatttttgtatttttagtagagatggggtttcaccatgctggccatgttggtcttgaactcctgacctcgtgatccgcccacctcagcctcccagtgctgggattacaggtgtgagccaccgtgcctggccgaggggcctccatctttaagtcagcgcatcaccctcatccagtgctttgttgggggttcaatggtagaatttctgcagatcccatgtgatgctcagtcgatacaacccaagagttcactttgcggcaccgaattctgtcatagttaagagcacaggctctggagtcagaccttgggtttgaatgctagctcctctcttcacttgccttaagtaatctgccttgggcaagtaatctaccacccctgagcctcagcttcttcacctgccagagtgaggcaatgcatcaattatcaataaggatgcctttggtcgtaagtgacaaaagtctgaccccaaatggcttaagcaacaaacaaacaaaaagataatctgttggaccatgcaactacagttcagggcgtggatttcaggcatggctggaaccaggggctcaaagaatgtgcccaggctctattttcctttctctatttcttggctccgctccagccttgctttctcacatagtcctgagatggttcagcagctcctagagctacatcttgactcattcacatacacagtctgtgtctcagaattcccaggtaaagtcttcatcttcattatgattggaccacttgaggtcacatgtccagacttgatccaatcaccataacccaggctgatagaacagtttgagccaattagggttgacttccagatctgtgggtgaagtcagccccatccaattggtgactaagaagtagagtggggagtggaatttgggaaggcagcgaacaaataatacctaactccgtagaacacttaccacctgccaactactattctgagcactttgcatatattaactctcttactgcttagaacaacccaaggagttgcgtcctgacatcattcccattttacaaatgaggaaactgaggcacagggagcttaagtggcttggtgacgctgcgaggaagtggcagaactggaagcagagatcttgggacttttgtaagaggtgccaggactggcacatcctaagcccttccacctgctgaggatcattctttaggaaaagctgataggacgaggtctggctgggtgagaggactcccgactgccttctcatcctccgcttgtcttttctgtccacagtgggatgatttcatggaacttggcagaagtatccctgacacccaactggagcaggtcatcgagagccagaaggcgaatcaatgcgcagtgctcatctacacttcagggaccacaggcatacccaagggagtgatgctcagtcatgacaacgtacgccaaagtccctttgctctggagtggtggcctttgggctgtttctcttgttggcttccaggggcagggtggcattccagggtctagtacgcagtgtggctccttcaccattgggggttagagagtagcgtagttgcttcactagggggcagcagagtgcagtgattgagatcaaggaatgctggccatgtcaaaagcagaaaaatgtctggcagggtatgcacccagcagacaatgattcctctgtgtgagtcaggaaggttgtgtgtgtgtgtgtgtg[131 bp omitted]cagcctcccaggtagctgggattacaggcacccgccaccatgcctggctaatttttgtatgtttattagagacagggtttcaccaagttggccaggctggtcttgaactcctgacctcaggtgatccaccgccttggcctcccaaagtgctgggattacaggcatgagccaccacgcccagcctactttatttttcagttgtgtgtgtgttttgttttgttttgctttttgagaccgagtctggctctgtgccccaggctggagtacagtggcactccactcactgcaaccactgcctcctgggttcaagcaattctcgtgcctcagcctcctgagtatctgggactacaagccagtgccaccacatccaactaattttttgtattttgggtagagatggagtttcaccacgttgaccaggctggtctcaaactcctgacctcaagtgatctgcctgcctcggcctcccaaagtgttgggattacaggcgtgagccacagcacctggtctgtttttacactgtttttagagatgggttcttaccatgttgcccaggctggagtgcagtgactactcacaggcacaatcatcatgcacttaagcttcagactcaacaggctcaagtgatccttctgcctcagcctcccaagtagctgggtctacaggtgcatgcaatcacacctggcctgctggtttttaaatgaagaatttctataaaagcattcttataaatgcttccctgccccccctcagcctagggtaatagttaccagcacacactggtgtctgaccacctcagtgttggaatcctggctttgctacttgtaagtaaccatgtaagctggtgtgacattggtcatatgacatcaccaaactgtgtgtcagtttgcccaactgtaaaatggggagagtagagggcccaattctggcagagggcctggcccatggaaggtcagcaatggaagattgcaaaagtcagcctccactcccttaatacactgtctcagctagtgctgtatagcaaggtgtggagctaggatcatccccctgggtctggaggtcccgatcctagatccacaccctggaaatcttctctgaatttctcattttaacatgaatccaaatcttttgccaacactgtctccttcagcagaactcctttcctcctcctgcatcttagctcaaggcctcttagaagttttctgatttttctacaactatggtttttactctcccacactgtctgtctgagcaatatcacgggcccaggactaaggtctatatgtaaattaaaacttggcttcctgtaaaatttgatgcataaatatattttgctataacaacaaggaaagcaggcttcaagtttggcaataaatcacgggagtacaaattaaaagttcagacattacagaagcccttggactcaattgtatgatgcatgatagagaaaaattatttttggcccagtctccatcatcgctcccctggacctgtgtggttgcttccaccccatccggttacccgcctcccacccaactcccaccctcacccccacccccagtctatcctctctacagccaccagagagtgcctgtgagcacctgagtcaagtcccaatcctcctctgtctgcagccctccatggctcccacttccctccaggtaaaagcccaagtctcctgaggcccacaaggcactgcaagcctagccccatctcccttctcctctcctctcctccctctctcccccttgctcactctgttctagccacatggtcctccttgctgttcctccaacacaccagacacgtcctgcctcttggtctttgcatgagctccgtgggaagtatttttccacacagcttgttccctcccctccttcgggtgggtctctgctcagtgtcacttcctcagtgaagccctccctaacttccatgtttgaaatagcaaacaataaaccaccccattactacctaattcccatttggctactttttttcttccttagaaaattttgacactgtcatattatatgctcatttgtttatcaggaacatcagctccttgaggtcaggggttttctgtcttattcactactgtaactgcagtgcctgatgagcaggaggactcaatccacttttgggaaatgaatgaatgagggaaatctgattaaacaggatattcccctctatgctggctagtatttatgctcctagtggctgcatgtgtggtaagacattctcctagcacaggcattatgagcatagatcctggagcaagactgcccactttttaaaggggctggtttttttcttattaagttccttatagattctgaatattagtccttttttatttttattttttttgaaacagagtcttgctctgtcatccaggctggagtacagtgacactatcgcggcacactgcaatgtccacctcccaggtttaaacaattctcctgcctcagcctcccaagcagctgggattacaggcacccaccaccacacctggctaatttttgtatttttagaagaggtggggcttcgctatgttgggcaggctggtctcgaactcctgacttcaagtgatccacccacctcagcctcccaaagtgttggaattacaggcgtgagccatggcgcctggccaatattagtcctttaattgatgcacagttgcaaatattttctcctattctgtaggttgtctttactctgttaattgtttcttttgctgtgcagaagctcttaagtcccaattgtccatgtttggttttgttgtatttgtttttgtggtcttagtcataaattctctgcctagcccaatgtccagaagaatttttcctaggttttcttctagtttcttcattcttctgcacatggctagccagttttcccagcaccacttagtgaataggatgtccttccccattgtttatttttgttgactttgtcaaaaatcagttggttgtgtgtggcttaatttttgagttctctattctgttccattgatctctgtgcctatttttgtaccagtaccatgctgttttagttactatagccttgtagtataatttgaagtcagataatgtgatgcctctagctgtgttctttttgcttaggattgctctatttgggctttctggttccatataaattttagaattgttttatataattatgtgaaaaatcatattggtaatttgataggaattgtgatgaatctgtagattgctttgggcagtatggtcatgttaacaatgttgattcttcctgtcaatgagcatggaatgcttttccatttgtgtcatctgtgatttctttcatcaatgttttgaaaagttattctcgtagaagtctttcatctccttggttaaatgtgtctgtgggtattttattttttgtgtagctactgtaaatgggattgaattcttgatttggttttcaactttaagaatattggtatatagaaatgctactgatttttgtacattgattttgtatcctgaaactttattgaagtcatttatctaggagtgttttggaggaatctttagggttttctagatgtagaatcatatcattggtgaacagagataatttgacttcctctgttcctattttcctattcatacatcttttatttcttgcttgtgcctgattgctctggctaggacttctagtactatgttgaatagcagtggtgaaagtggatatccttgtcttgtttcagttcttagagggaatgcttccaacttttccccttcagtatgatgtttgctgcaggtttgtcatagacagctcttattattttggggtatattccttgatgcctagtttgttgagggttcttatcataaagaatgttggattttgtcaaatgctttttctgcagccattgagatgatcatatggcttttgattttaattctgtgtatgtgatgaatcacatttattgatttgtgtatgttgaaccatccttgcatcccaggaataaagcccacttaaaaagtatctttattttcatttgtttcaaagattgtttttattgcttctttaatttgtttacccaaaagtcattaaggagcaagttgcttagtttccatgtatttgtgtggttttgagggttcctcttggtattgatttctaattgtattccactgtggtctgagaagatgcttggtatgattttgatttttttaaatttattaagactttcattgtggcctagcatgtggttaatcttagagaacgttccatgtgcagatgagaaaaatgtatattcagaggccactgggtagagtattctgaagatgtctattaggtccatttggtcaactgtccaatttagtctagtatttctttattttctgcctcaatgttctgtctgtcagtggggtgttgaagtccctcacaattattgtatggctatctcttaagtctagtagtacttgtcttataaatctgggggctctgatgttgggagggtggttagatcttctggttgaatttaaccctttatcattatataatgcctttctttgtctttttttttttcttaactgtcattagtttacaatctgttttattggataaaacagtagcaccctctcatcttatttgttttctgtttgcatgatagatctttctccatccctttactttgagcctctgagtgtcattacatgtgagatgggtctcttgaaggcagcagcaggttgggtcttatttattattattttttatcaaatttgtcactctatgtcttttaagtgctgtatttaggatgtttatgttcaaggttaatattgatatgtgaggttttgttcctgtcatgtgtttttgctttgtattcttgattgtttagttgctttatagggtctgtgggctttgtgcttacatgtacttttatggtagcaagtattgttcttttgttctcatgtttagaactcctttgggcatttcttttcgggctgatctagtgatgacaaattcctttacatttgcttatctgagaaatattttatttcccatttatgaaacttagtttagtgggatataaaattattggctggcatttatttttctttaagaaggctaaaaatgggccctcaatctcttctggcttgtgaggtttctgctaagaaatccactgtacgtctgatggaatttcctttatatgtaatttggcccttttctctagatgcctttaagatttattttttttctacattgaccttggtctgatgactatatgcctcgggggtggccatattgtgtagcatctcacaggagttctctggatttctcatatctagatgttgacctctctggcaagattaggtaaattttcctgtattactccctcaaatatgttttccaagttgcttaatttttcttcttttctctcaggaatgcatttaagtcacaggtttggttgctttacataatcccacatttctcaaatactttgggttttttatttcttttttctttacttttgtctgagttgtttgaaagaccattcttcaagctctgaaattctttcttctgcttggtctagtctaactatatttttaaatttctatagtgaaattttcaattccagaagttcaatttggttttttcttaatatatctatgttgtatttcatatattgaagtgttcttctagtttccttatattggtttccaactttctcttggatctcattaagtttccttccaattcatattttgaattctttatatgtcatttcaaacatttcagtctgatgaggacccattgctagagaactggtgagattctttggaggtgttgaaacactctggctttttctactgccagatttcttgcactgattccttcttatctgagggagctgtcacttcttgtttttgaatcttctattgtttggatggggcttttgtattttttaattctagtttcccttgagggtatggctgtggtgtatgttgtgtgtgattgtatggccttgcttctgagtgcttttgggggccaaaggtctgtatgggttccacggttgtggacagcttctgtgcagtggctaaggtctgtacgggttccatggttgtggacagcttctgtgcagtggctaaggtctgtatgggttccatggttgtggacagcttctatgcagtggctttctcagatgctgcttgttgtaatgatgtaatggacataacagccaacactatctcctgcaggactgagggtgtggaggtctcaggaggcttatctcatgcactgtcaataaacccttccagtagcaagatttttgtttggtggtgcagtgcaggatgcagtccagtagatcgcacttaaaagttagaaccagcaggtaggctggtgccaagtaggcatgcataccctgatggaggtagcaggaagagatcatgatggggtgcactgaggtctcaggggtaggggcagggaatgcaccagctccttgtcctcagccagcaggaatgcagtccgcttctctatcacacccctgtcatggggctcacaatcttctgtttataaaggcttcatcctttagttcctggcagcagtgtggggtgggagggcaggtgggaaatgaccccttctccatgtcttttcccaggcatgggtgctgcccactccagtggtttgtgccacacccacatttcctttgtcccaaggggggctttggtgggctgcattctcctcctcctttaggggttacccatgccaagggttagatcttcagggatcctgcggccccccagaggctcactggtcccttgtgcttgccaaagtcacagcgcgttgtggggtatgtttgtggggaatctggtggtgcagtgggtcaagggcagagaatccccaggcagggcagtggcaccacaggtgcacaaccagtgtggtgcctgctgtctcagttcaggtctgaggggagtgtgggcatgcctgtgtgaactgaccacctggttctctgtccctgggaagttctctaatcagcaccgatggtgttggcctgggttgcaagggcagaggagctccctgagagtttagtgaccaggatattgtcaaaggcgagtgggaagcaaagaagcactcccacctatcctttccatggggctctgagttcctcaggagctgatctttgacaggcccttgcagctttcctttcctacgccgcagcttcttcctgtgggcactccaagaggtcctgcctctccttcctccattttcagttcaaaacttatccatttaccagtaattttgatcttcttcctgaaaactgacatctgatgtccgttgtcagccatcacgtatcaatacactgttagcaagtggcagattctcattcatatccttctggttccaaaccacaaggctttccacaatagggaagatgacacttgtcagccacgctgagcccaagccacagggctctgggcagggtcatgctgtctgtgggtagcttacaggaccaacatgaggacatcactcttgaactattttttttttttttttttgagacagagtctgctctgtcgctcaggttggagagcagtggcacaatctcgactcactgcaacctctgcctcccaatttcaagcgattcccccacctcagcctcctgagtagcagggattacagacgtgtgccaacacacccatctaatttttgtattattagtagagatggggtttcaccacgttggccaggctggtctcgaactcctgacctcaggtgatccacccgccttggcctcccaaagtgctgggactacaaacatgagccaccacgcttggccatcactcttgaacttcttaacctggtggctgactctcccaacagcaagtggtcccaaagatttgtcagtcccagaatttccacagcatcccttctgctcctttctgtcagtcaaaacaaatcactggaccaattctgtctcaaaggaaagagaaacaaattccacctcagaatgggaggagtagcagagaatctgcagctctgtttaatctaccacatatacataaaatgcttagaacaatgcctggcatacaggaagccatgtcaaggatagctattaatattgtatttggctgggtgcagtggcttatgtatgtaatcccagcactttgggaggccgagacaggaggattgcttgaagccaggattgtttgagagaaggctgggaaacacagcaagacctcatctctacaaaaatgttttaaaaattagctgggcatggtggcacatgcctgtagtcccagctactcgggaggctgaagtgagacgatcccttgagcccaggagttcgaggctgcagtgagctatgatgctgccactgcactccagcctgggtgacagagtgaggccctgtctcatcatcatctttacagcaagaagttaaaggtagccttagattcttgccagatgtctacagctcagtgtttctcccgtgtagggaacactatgttcagtgctaagataaacacattttaactccccactaaaaccccacgaggaaaattttgtcactaacccttttacagatgagaaaactgaggctcagacagaggaaattacttggtcaagatcacagagcaagggaagctctgaactgagatctgaaccaggagtgtctaaaccattgtacatcatagactatacacaacaagccccttctctcaacaagtgtgctaggttccttgaaccctggactgtgcatgacaaggtttatgggagccttcatcctgagcccagggaaagaagtggaactagccttgagggatattttgggctgactgctttatgtcctttactgcagttaaccattccttctatttcctcattcattcaagaaaaattcattgagcacctagtatgtactggggaatattccaggagcaggggaaacagcagcaaacaagacagactcaatctggaccttgggaacagataagaaatgaacaaatgaaaacattcagtttgtgtgacatggtacgtacagacttaggcagtcaatggcactttcaccttagatggtgtgagatggcccttctaaggaagtgacatttcagctgagacttaatgttcaagaagtagccagccatgggggtgggggacggtgagggaaaaggctgaagaaagagcattccaagcagggggaatagccagtccaaaggccctgaggctggaccatgcctgatgcattggagcaacagcgaggaggtctgggtggctggattaatgaagtaactattcaccagagatttatgacactagtgagaaatataagtgacaaaattataggtacactaaaactttacatctacatatgcattggagaaagaaaaatgctaataatgctaattactggggtgtttatatgatgggattatgggtagcctttttgtttgtttgaccatgttggttccatagttctatattggacctgagaagcctctgtccccactttaaagaagaggcaataaaagccacgagggattttaaggaaatagcccaaatgtctagcaaacagtggagtcagggtttgactctgggacacttgctgaatccagttttctgagttctgtcgttggacccaaggaagtctgcaacctccctactcctaaagctgcctgctaaattttgcaactcctcctaacttcaggcaagttagttaaggactctgtgcttctgttttcacataattctccctgattaaaaaaaccgttagacctagggctttacccaaaaaaatctgtcgaatgattaacaaccatctactcacctgggctacccaagaggctgaagtgggggccccaggtccttactcgatcttaccttgagagcatctgcttgagcaaagtatgtgagcgccccaatctttatgggtacccagatgtccatcatctgtgctgcaatatggctgagtgggaggtagctgaccaccatctcatgcttgtctgtcagttgaaagtcctttgccactgctcctgccatccacgtgatctgtaacataagggacaatccaaggtgccttatactgacttatgaaaaaacaacacacacacacacacgcactcagccagactgcagcacagacaatggacatctgggtacccataaagatcggggcactcacatactttaggcttaagcacatgctctcaaggtaagatcgaataaggacctagggcccccacttcatcctcttgggcagcccagatgagtagatggttgttaatcattcgacagattttttgggtgaagctccaaaaattttgggagaattatagttaccaacccccaggtgttatgatgattaaatgacttggtgtttgtaaagtatgaagacagtgtcttggtcatagtaggtgctttataagtgtttacttaattagtttatttatttagctaaatacatttaaaatcgccctccaggctgggcatggtcgctcacatctgtaaacctagcactttgggaggctgaggcgggaggtcgctggaggccaggagtttgaggccaagctggaaaacatagtgagaccccctctctacaaaaaaagttaaaaaaaaattagctgggtgtggtggtgtgtgcctatagtaccagttactcaggaggctgagatgggaagattccttgaacccaggagtttgaggctgcagtgagctgtgatcacaccactgcactccagtctgggtgagccctgtctgaaaaataaataaaaatttaaaaataaaatggcccttctatgagggtgaggcaccttggattgtcccttatgttacagatcacgtggattgcaggagcagtgacaaaggactttaaactgacagacaagcatgagacggtggttagctacctcccactcagccatattgcagcacagatgatggacatctgggtacccataaagattggggcgctcacatactttgctcaagcagatgctctcaaggtaagattgagtaaggacctggggctccgacttcatcctcttgggcagcccaggtgagtagatggttgttaatcattcgacagattttttgggtgaagccccatgtctaacggttttatctctgccctcatcttaatgctctatttagaagcattaaaaacaagaccaggcacagtggctcaatctgtaatcccggcactctgggaggccaagacgggcagattgcttgagctcaggagttgagaccagcctgagcaagatggcgaaaccctatctctacaaaaaccaataataatagtaaatttttctaaaaaacaaaaaacacctgaccaaataaaacaacttttttttttttttaaccagctggctacattctcctagtttttatctttatccaagtcagggcatccatgtatggttatgtagattgaacactgaacaacccaagacaaagatgtacttggtactgaaagtaaagagtgtgtgtgtgtgtgtgtgtgtgtgtgtgtgtgtgtgtgtttataagtcagtattcccaaatctaaaaagctccaaaaaacaggagtttttggcagcaaagtctgatctgaattgataagatgttgtttgtggtcttcattttattccacttactgggattatgcatatatttgtagaatttttataccaccttttcttgacttataccctttaagtattatcttttgcctttctattgtggtgaggatttagctcccttcctctcccgtcttctcatttctccttccccattctctcaacataaattattcttagttaactgagccaagtagtttatcatatgattccacttcctgcttggtacaactttttgtttttcccagaattaagttgcctttcttttccagtttggtgaagtttttgcatacatgtccagttgctccatctgatctgtcacatgcttatcaatagtctccaaatgttcaaatattcattgcattattattattattattattatttgagatagagtcttgctctgttgcccaggctggagttacagtgccatgatctcggcccactgcaacctctgtcttccgggttcaagcaattctcgtgccttagcctcccaagtagctggaactgcaggcctgtgccaccatgcctggctgatttttgtatttttagtagagatggggtttcacaattttggccagactggtctcaaactcctgacctcaggtgagccttggcctcccaaagtgctgggattacaggcatgagccactgcacccagctccattgcattatttttttcctccatccttttgcacttagctggactgttgttttaggttgtcttaggttgggtaccctagaagcaaaatctgagttggagatctttgtgatttatcaatggggagctctcaggtgaaaaccaaaaggaagtgaggagagaaggataggctgggggaaaaaacaagaaaggacacacattcagctggattgtaacttcagactgatcccataggaagctctgaggcatgaacgacaccagagttgttccactttgaggcaaggaggctgtgcttttgtaaccccaactcagatagtcattggctgtgggctcaggcatccatgtgggatagggagcataacttcccagttatttctaagtaagggcggttttctggaaaagagggaactgtgggccactagagatctgataggacatcaacagcatcttctacaagctgccatacagggatatccctttttcccactcctgggttggatcccctattttctggggtctttgccttcttttttggattattccttgatttagctggatatcattcattggtaggttttgcaaagtagttatgtgaaagaacactttgatttcttttctaaatttttttttttttttttttttttagagacaaggtcgtgctctgttacccagcctggaatgcagtggcatgatcatagcttactgcagccttaaattcctgggctcaaaggatcctcccacctcagcctcccctgtagccagaactacaggcatgtgccaccatgcctgactaatttgttttacagtgattttctacatgtctagactttgcaaacggagccagaaaagaactctgacattttccccaagttacattctctgaattagtttcctgttaatgccacaacaaatgaacagaaacttagtgacttaaaacaatatttatttatttatttagaaatggagtctcgttctgtcacccaggctggagtgcagtggcagtggcatgatctcaactcactgcaacctccacctccgggttaaacgattctcatgtctcagtctcccaagccgggattacaggcgtgcaccaccacgcccagctaatttttgtatttttagtagagacgggatttcaccatgttggcaaggctggtcctgaactcttgaactcaagtgatctgcttgcctcagcctcccaaaatgctgggattacaggcataagcaagcgcgcctggtccatttattatcttatagttctggtggtcagaagtttgaaaatggtctcactgggctaaaatcaatatgtcatcagggctgcattccttctagaggctcttggggaccttttccagcttctagaggccacctatgttccttatctcagggccccttcctccatcttcacagccagcagtgcagcctcttcccctctcctgcttccctcttataaggaccctgtgatgacattgggccacccagatcatccaggatgatctcccatctcaagattcttaacttaatcccatctacaaagtcccttttgccatgaaagattacatattcacaggtcccaggagttagaacgtggacatctttagggggccattattttgcctcccacactctccatcaagcaggctaaatcttagggcctttgcacgtgcttctagaaggttctttctcttgttctttgcagggctgactcttctttgtcacttagctctctgctaaatatttccttggcccctctcaatccctctcatatgccccatgctcagtgcctgagatgtgttaggtcttcaatacatatttcctttcttggctgaatacataatacatacacatttacctacaggacctgagaagttcccattttcccacatccttaccaactcctaatattgtcaaaatgtttacaacttgtcaatctgaatagtgacaaaagtgtcttaatattttcagaaatttccagattgttttctgaagtacgtgcaccagaaatgtgcgaaggttacagtttctctacatcttcactaacgcatgttactatctgttttattattattattgccattctaatttgcatttccttggtgattaatgatagtgagcatctcttcatgtgtttattgaccatttacatatcttctttggaaaaagaaatctgttcaaatagtttgcccatataaaaatgtggttgctctttctgtgctagcatgactagtaaaaagaaaagtaaaagccaggcacggcggctcacgcctgtaatcccagtactttgggaggccaaggcaggcagattgcttaaggtcaagagtttaagaccagcctggccaacatggtgaaactccgtctcctccgtctctactaaaaaaaaaaaaaaaaaagaaaaagaaaaattagccaggcgtggtggtgtgcacctgtaagcccagctactcaggaggctgagacaggagaatagctcaaacctgggaggcaaaggctgcagtgagccgagatggtaccactggactccaaccggggcaacagagggagactgtgtcaaaaaaaaaaaaaaaaaaaggaaaggaaaggaaggcaagggaagagaagggaggggaagggaggggaggggaggggagaaagaaggaaagaaaggaaggagggaggaaaaaagaggaaggaaggaaggaagaaagaaaaagaaagaaaggagaaaggaaaaaaattaaaaatgaaaaaaattggttgcatatctaatctcattgttgagtgttaagggttctttatatattctggttacaaatcctttaccaaatttgtggtttgcaaatactttctcccagttctatggcttgttgtttcctcaataatcttttgaagaggaaaaagtgtttaagttggatgaagtttgatttatctattttcttttatgcttttggtatcatatctaggaaatctttgcctactctaaagtcacagggattttcttctacgttttcttccaaaaggtttttagtttgagctcttacatttagggctataatgcattttgaggtaattttcatgtttggtgagaaataaggctctaaccctaaattttgtggaagcgtttgtttgttttattttgttttgcatttgaatagtccccacccgcccccccccccaacgaaatttccttggcattttgttgaaaatcaactgagcataaatttaaggttttatttctggatcttctattttgttccactgatctgcatctctgtctttacgccaaagcctcactgacttattacactagcttgatagcaggatggctaacgtttcctggtttgcctgggacttccccagttttaaaacagaaagtttcacatttcagatattcctgcagttctgggtaaaccaggacggttgttcaccctactttagaataaattttaaaatcaggtagtaagtcctccaattttgtctttcttttccaaaattgcttgggctattctaggtcctctgcatttctatataaattttaaagtcagcttgtcaatttgtatttaaaaaaaaaaaaacttgcctagatttcgataggggttgcattgaacctataggtctctttgggggagaatcttgcatccttttttaacagttgtgtaatattccactgcatgcttggaccacagtttctttagccaaccctttgtcattgaacctgtaagctgtttccattctgttacaaaacagtgttgcaaagaacgtcttgaacgtgtttctttgtgtgcctgagtctttccttcagctgaattccttcacccacagaagtgaagttgacaggttgcacttaaaatgttaatagaactgtcatgttaccttccaaaaatattttaccagtttatgcctctcatcaaatccctagacagagtgcaaaaatctgactggccaacccagctaatgggttgtctccttttggttgggagtcctgcgtaatctgatcagtgaaggaatgttctcttgggcaaagttgggtggatcaggagagatggacatccctggtgcacggaaggccctgctgtggctaacctagcttcgttccatacagggcaccttggtaagtactctaaaggaggtaaaacctactgtcttcattggagtgcctcaaatttgggagaagatacatgagatggtgaagaaaaatagtgccaagtccatgggcttgaagaagaaggcattcgtgtgggcaagaaacattggcttcaaggtcaactcaaaaaagatgttggggtaggtggagcatccagagggctgggagggtagttggtgaggaggctcagccttctccagtgggtcccatcagcccttctccacttgacggcattcttattcacaggaaatataatactcccgtgagctaccgcatggctaagactctcgtgttcagcaaagtcaagacatcccttggcttggatcactgtcactcttttatcagtgggactgcgcccctcaaccaagagactgccgagttctttctaagcttggacatacctataggcgagttgtatgggttgagtgagagctcgggaccccacacgatatccaaccagaataactacaggcttctaaggtaccagcccccggggcagacccctgctcctcccataacatggggtcaagagggggaaggtgggtggatagatgggcctctgggttaagaggaatcctgacgtggtgtctccagaatgatcctgttctccagcctccaagtcctaactccgcatgaccgtgggaaaccctggatggtaagagagcccacagataagggggatggctctctgaacattccatggtctccccgtttgtcacttgtgagttctgccttcaaggtcaccgcctgtgacctcagcacctttcatccccatgatcctccatctcaaaacacctccatggccgattcctggctttctcccaagctcagcttgccctaggctgcaaggttgaacccaatgataagaaaactttaagaataccaaattgaggttcaactccccatctgagagctgtcagtcatagaatcttctggttgtgtctctccctgactccctccttttagcatgggtgaggtttgaaaaaatcttttcatacatgtgtttatttattaaattttaattagagatagggtctcactttgttgcccaggctggagtgcaatggtacaatcatagatcactgtaaccttgaacttctggattcaagcattcctcctgcctcagcctcccaactagctaggactacacgcatgagcctccatgcttggcaattctgtaaaagtttttttgtagagatggggtcttgccatgttgcctaggctggccttgaattcctggactcaagcaatcctcagcctcccaaagcgctgggattacaggcatgaaccaccatgcccagcattgccatacatttaaaagtcatttgtacttcctttcctatgagctgtctgtccatattatctgcctgttttaaaaattagattattggtccctttattattggtttgttggcactctttacatattaggaaaatcagccctttgtctttcatatgagttacaaatattttatcccctggcttgtcattggtattttgattttagttaagatgttttttactgtgcagaaatttgtggtcacaaatttagatggttgaacttatcgatctcttatggcttctggatttttctatatacctaaaaaggcttcagtgggggaaatcataaggcagctctttgtaagttttaaatttctcaggtctgtcttcattttttcttttgctaaccaggggaatacctacatttaaccctgggaccattggccttgctaactgttaatcaaagagatctcagcaacacacggagaaaatatttcctttcctgcatcctagaactgcactggccagtgctatctctaggaaaaaaaaaaaaaaagacaaagaacccagatttcaaatagtgctactctgttttatgaaagtaacttttacctctaaagagattgtagttggttgccgtacttaaaattagctgtcctaatcactgcagagaggtctacctgttttctttaaaatgagggttttgttcctatctttaagccaaaggcatttttttctttgccggcatatgtggagatgaaaaaaaaaaaaaaaaaaaaaaaaaaaaaaaaaaaaaaaacgaaaaacagcctgcaatgctgctggattttctttcattttttgtttttgtttttgtttttgttttttgagacagagtcttgctctgtcgcccaggctggagtacagtggcgtgatcactactcactgcagccttgacctcctgggctcaggtgattctcccacctcagcctcccaagtagctgggaccacaggtatgtaccaccatgcccaacttttattttttattatttttgtagagacggggtctccgtatgttgcccaggttggtcttggaactcctgggctcgagcaatattccctcctcggctttccaaagtgttaagattacaggtgtgagccaccacacctggccactgctaggtttcccagttcacaaagcctttgggaatctgacacgctggattaaacactgcagcaaacacctccttctgtgcgctggggtgcatatccagcctgctctagctgagcagagtattaggcacctaggctgaagatccaggcagagctgggtggctgactttgtccctatgagcctgtttctctgcttctgtcccctggcagctgtggcaagatcttgactgggtgtaagaatatgctgttccagcagaacaaggatggcattggggagatctgcctctggggtaggcacatcttcatgggctatctggaaagtgagactgaaactacagaggccatcgatgatgaaggctggctacactctggggatctgggccagctggacggtctgggtttcctctatgtcaccggccacatcaaaggtaccaggggctgagctctttgggaatctcctgcaagcaggcccaccctgaacatttaagggcccagggtaccagcacgaaggccacccccagttcctcaccttccaagaggagctgtgcagaaactcctcagtctgtacaacccagctctatcctcctgtccagcaaacagttaccccttggtcacttggtatcccgtggtccaccctcaggaggatggacctgcaaaagacaagccttggaacctcctgaagcccctttcagaatagcaccagcccagaggaaaactcagtaagagaaggataaagaaattccttgtgacatcattttggcacctggatccagccatatctgaaagccaaagaccttttgaacttttcagttatattgagccaacagttttacttttttttttttttaactcaaactcattcaagctggttcaaatgggcttgagtaaaaaagtgccatcttctcctgcattttaagaggataataatcgacagagttgtaaggattgaagaaagtatagaacaaggataagccaacttttcctgaagagggccctttagtaaatatttttgggttcacaaaacatgtgtctctgttgtagcttctcaactctgtgatttgtagcacaaaaacagctgttgacaacacataaagaatgggtgtggccagctgccaatatgaatatcataatttttatgtgtcaaaaaaaattcttcttttgacttccaacaacttaaaaatgtaaaattcatttttagcttttggttatacaaaattgaatagtggcctggatttggccactatgggccatagtttgccaaaatctgatggagaacacttagtgcttttttactcaaacccatttaagatgggtttaaataggtttgaggaaaaaaataaaaagcaaaactgttgactcaacgtaactgaaaaggtcagttggccaaaaggtcagctggcttcaggcatggctggatctgggtgccaaaatgaggtcataaggaattttaaaattcttttcttgagttttcctctgtgctggtactattttatttttcagagaaggtctcgctctgttggccaggctggaatgcagtggtccaattatgactcactgtggcctcaacttcccaggctcaggtgattctcccacctcagcctcctgagtaactaggactacaggcgtgtgccaccacacccggctatttttttgcagagacccaatttcactgtgttgcccaggttggtctagcacttgtgggctcaagtgatctgcccacctcagcctcccaaagtggcaggattacaggtgtgagccactgtgcctggccactaggtttttttttttttttttttgagatggtgtttcactcttgttgcccaggttggagtgcggtggcatgatctcagctcactgcaacctccgcctcccaggttcaagtgattctcctgcctcaacctcccgagtagctgggattacaggtgcacaccaccaaacctggctaatttttgtatatttagtagagacggggtttcaccatgttggccaggctggtctcaaactgggggttccacgttgtcatggctggacatgtaccaagccaagctctgttccagaaatccttatcactgctggtggtgaaaatgtgccccccattcctgttgagaccttggttaagaagaagatccccatcatcagtaacgccatgttagtaggagataaactgaagtttctgagcatgttgctgacgctgaaggtaacatgggtttgctgtcattgggggaagtctctgcagccggtcttgggttccctggccccaccccagggtcaagaggatgcatctgtgggttcaagacccacttcttggtctgtgggcctggggaggggtgctggtcaaggagcatgggtggtgacagaggtgtctgggggcagtgtgagatgaatcagatgagcggagaacctctggacaagctgaacttcgaggccatcaacttctgtcggggtctgggcagccaggcatccaccgtgactgagattgtgaagcagcaagaccccctggtctacaaggccatccagcaaggcatcaatgctgtgaaccaggaagccatgaacaatgcacagaggattgaaaagtgggtcatcttggagaaggacttttccatctatggtggagagctaggtgagtggccatgacatttggaggctggtcccttgttagcatctgggactgtgtgggctctgaagagacaggtccttttctgaaggtcagagggtctatgaaaccagccagggaccaggagagggaggctgccaccttcagctaactggtccccagctcctcatcttggaaataaaatccaacctccttactatagctctatacaatctctcgcctgctgacctttcattcactctgcaccaactctatgggctttcttgatgttcctgcagctctctgggctttgtccaactatagggcctttgcacctgccagtctgcctccctgggaatacccttccccctcaattccttgcctggatggcttcttctcattgtccaggtctcaccctacaggcctcttccccctcagagcagccttgttacaggacccccaggtttgtatgcccactgcacagtaatataccaatacactgagacagcaggggatgcagcaaagacagagtttaattatggccaggcacagtggctcacgcctgtaatcccaacactttgggaggctgagttgggcagactgcttgagcccaggagtttgagaccaacctgggcaacatggtgaaatcctaactctacacaaaatacaaaaattagctgggtatggtagcggtgcccagctactcaggagactgagaggatcgcttgagcccagggaggtcaaggctgcagtgagccacaatcatgccagtgcactccagcctaggcaatgcagtgagaccctgtctcaaaaacaaaaaacaaacaaacaaaaataaaaaaggaaattaaattcccttgcagggaagccaaccgagatggaaggaaccctcaaatctctctttgaggaattctgggctggggttttaaggggatctttgggggtgaagggctggaaaattagagtcattgattggttgaggtaaaggggatgaaatcatcggatgtggaagctgcattctttggtaagtcagctcccgtggggtccttcagatcagtgggcatcagtagtttcactggtatgcaggacttgaaaggatatctcagatggaaaacttgacctttcacaatgcttaatatgttatctgtagagcagttaaggggaactatatcttgtgattgggttttttgtgtgtgtgtgattctggggcaataggcaaacagctagctatgaggaaggggttagagagcaaactgacctaatgatgaatgttgagtgtgctgtaagtgtggctgattttagtttgtccccctcccttcttctctgattaatattataaagttttcagggatggtttcagccctccctgaccatgctggctaaagtggcttgccatcgtccttaatatttcacccagtagcttgctgccacccccattataccaccctgtcttctttaaagcatcagaacatgaaattagtctctgtatgttttatttttgcctctcttcccccatgagggaagggctcactccagagtggggatactggattctactaatgtactttcatttgcgagtttgctgtcagcgctcggctgtaatctgacggtgtggatggaagaatcagagcaagtatgtggcaatgaacaacctgggttcaaatcctgtcccctctacacagggaagtgacttgtcccactgagtcttgttttttttttgtttgttttgagacagagtcttgctctgttacccaggttggagtacgatggcacaatcacagcttgctgctgcagccttgaactcccaggctcaagcgatcctcccacctcagcctcctgagtagctgggatgagtgcgcgccaccatgcgtggctattttctttctttctttctttcttttttttttttgagacggagttttactctgtcgccaggctggagtgcagtggcgcaatctcggctcactgcaacctccacttcccaggttcaagcgattttcctgcctcagcctcccgagtagctgggactacaggtgcgtgccaccacgtccagctaattttttgtatttttagtagagacagggtttcacc[139 bp omitted]ttgtccaggctggtggtcttctcatctataagttgaaaacacagtccttgtggggttgcttgagacacccagaggggcttcaatgcccctggtgactcagaggctttcaatgaaagtcctgggctcagggagcagacaactcccagtttgagacttgattctgccgtgcacttgctggctgacctcagaggaactggtcctctctatgccccagtttcctcacctgtaaaatggggataggggtatggtttgagatgatgatatccctcctccattgggtgcacagtccacatcaggcacagaatgcaccatgctcttcaccttccagctcacagaatcctcaccacagctgaaggatcacatggaagttttatcatccccatacagatggcaaaagttacacaccctgaaagtcaatggcacagccagccacccagcctagccccaggcatgggactctgttgcctggtcatgcatgggtgtgtgtaattttcttttatctccacaactcaattgatttctcctttctcgataggtccaatgatgaaacttaagagacattttgtagcccagaaatacaaaaaacaaattgatcacatgtaccactgactgctttgatggagctgctctcagctgttctgatggtgagattcagttgcttggctttgctgggctatgcattcagagtccaagagagggctccactgtgtggcaggcagatctgtgactggaactgcagaaaacacacacatacacacatacatacacacacacacacacacacacacacacacacacacacactcttagttgcagtggattctgagtagcaggcttcaactcatgctgtctctactctaccagggtcatggtagggtgtgtaaactccttcagctggccaccaatgttgttagctgtgcttcctgccttttctatttgtttctagaaagtaggaggcaatgaatcccaaatgtctcattgggtcttatttggagaaggcctttgtcagaaactttagtggagaaagttctacttgccaggaactcaaggaatgaggtgtgttggcccattacacagataataagggatggaggcttgaacttccactatccaccgtttatcctctcttttccccaagacatgtgcagagggagcctccatgacaccatgaatcactgatagttattgaggtgttttttttttttttcttcactagatgcacagtgcaggcagaaagtagaatgcatcttcaattgtcctataggctgcctgtaaccttttcatgggcaacttgttctaatgccaccagccaacccatgttttagtttgctggggctacattacaaagtaccacagactggagggcttaaacaacataaacttattgtctcacagatctggaggctaaaagtgtgagattgagaggctggctggcttggttccttctgagggctgtgaggggaggatccattccagacttctctccttggcttgctgatggctgtcttctctctctgtcttcacatcatcttccctctgggtgtcactgtgttcaaatttcccttttatagggacaggttagtaagattagggcccacccttatgacctcgttttaacttctataatgatctagtttccaaataagttacaccctgaagtactaaaggttaggacttcaacatgtgaattgtggagggatacaactcagcttgtaactcatcatatccattgtcctttgttcaacgttaactggtttaacccttccacaccttcatttgttgatgtcttgtgggtgggcccagcagttcaacgtaccacattcataattcttcatctttcacaagatttccaatttcactttccagttgaatgagaaaccattggacattgatgtgggagtgagagatggaccctcttacaccagtgctgtccaatatggcagccactggccactatgtggtctgtccaaaccaagatgtgctgtaatacataaaacacactgggcttcaaaagcacagcaccaaaaaaaaaaaaaaaaaaaaaaaaatagaatatacaatatctcatcagtattttaaaattttgattacatgttgagatgatattttggaataccgggttacgtaaaatatttattattaaaagtaattttaccagttttaaatttttatttactttttagagacagggtcttgctctgttgctcaggctagagtgcagtggtgcattcatacctaatgttttaaatgtttttgtagagatgaggtatttctatgttgcccaggttggtctcaaactcctggcctcaagcgatcctcctgcttcagcttcacaaagtgctgtgattacaagtgtgagccactgtgcctggccaagttccttttttaaaaatgtagctgctatacattgttaaattgcataggtggctccagtaatgtttcttgtggatagtgccactctaaagttcattgtggggagattttgggtgacagccaatttataaatggatcgattcactcgggaatattttcatcatatggtgactgtgggatcttggagactgaatgcacatattacgagaatccccatgtgataacttgtgtttctcctctttgcagccttcagcaggaagacctcattgcaataagtgaaatgctgctctaggtagaagctctccctgctgtttttaagaagccacattcctcattggtcagtttcttgattgttcgtctgttggagaggtgctccctagaagaacctgccatacgtttcaaagcaataaaatcactgtatatctttctaaggaccttcaagtcatgactccagggaagcctattgggaagtctactaaaaactgcctgatttacaagaaagacctgaacttgtgggctcccatttgatttttttctcctcaggggactcagacattagaaagaaaaagcctcacagatttgaagaactggacccccaaatcaactcacctgcctggaagcaactgggaaacccttccaataagtcctgataataaagcacttcagggtcccatgtcttgatttttggcttgatagaaatactttgtcctttatttagtgtgatggggagggcttggactctgaaatcagttctgggttcaaattgtgaccagctgtgatttcaactgtctgaggctcggagattttaaacctggaaagtagatccccatctcggagggtggccatggaagttcatggagatgatgtacagggaatgcagtatctaactccagaaagtcctcggtttgagttaatggttatcatcaacacagtcactcttggttaactcaagagtcaaggtatgactcttgactaattccgtcattagggaggagttttctgttgtagtaagttaagtaaacttaaagaagatagtttattcctctcccatccaacagtcatattataagcagaccagagctgataaagcatattcatagtgtgtctccgaaatattagtagggagagtgggagagggaacatctcccagcctggacagaaacagcatatcaggagcaacaaaactcccagtgtctcttaagcttctagatactcagaggcaggccagagacccttttgagttccattttttaaatacaccagaaatttaaaatgacattctccttgcaaaaaaaaaaaattaatgcaatgccgataaggctaatgtcatatttgattgctgtactaggccattattgcactgttataaagaaatacctgagatggggtcatttataaagaaaagaggtttaattaattagctcatggttctacaggctttatagaaagtatggtgctggtgcctgttcagcttctggtgaagcctcagggagctcacaatcatagcggagggcaaaaggggagcaggcatgtcgcatggcgaaagcagttgcaagccagagggagtgccacacatttttaaatgaccagatcttttgagaacacactatcgtgaagacagccccaagccatgagggatccgcccccctgccatgacccaaacacctccaccaggccccacctccagcacaggggattacagtgcaacatgagatttgggcagggacaaatatccaaaccacatcaatggccctcctcaactatttggcgggcttttactttttaatgagttagtacagttggtcctcactatctgccaattccatatttgcaaatttgcctcatcgctagaatttgcttgtaaaccccaaatcaatagttatggcactttagaggtcattccaggacatacacaggagtgaaaaatttgagtggccaactgtacattcccagctgaggttgaacaaggcaacactctggcttcctgtttcagctctcacactgtaaacagtgccctttctgaggtatatctcatgccacattttctgcattttcatgtttctgttagtaaacctttttgagttttttaaaaatagagacagggcctcactctgtcacccaggctggagtgcactggtgtgatctcagctcactgtaacttcaaattcctgggctcaagggatcctctcctgtcttggcctcccaaagcactggggttacaggtatgagccactgaactcagccaaacccttctaattttatccatgactacactgtacaatttttggtcaatataattctattttatagtttttgtttctactgtccatgtgatctccccacttgtaggttttctaggtagttaatgttggtatatggaagtgctgttgatttttgtatgttaatattatatctagacacctcactgctaacctatttctcaaaatgtgtaagctttttacagagatgtgcatatcttttgcaaatatttttttacttccttttcaatattgattcctcatcaaggaaatacaaatggttgatcatgtcaagtgagggaagctcgaatacaggagaggaatgtatgtattttctataatgattctcaccctggtctcactgttctcttaatgttctctcaatgttttttgagaaacgacaagaatctactaatgtcaggaaggcttttaaaatttaactgtggtaaaatatatgtaacataaaatgtgtcattttaacccttttttagtacacagttcggtggcattaagcacattcacattgttgtacaaccatcaacacgacgcatttctagaagtttcatctcttcaaactgaaactttatatccatcaaacaattccccatttccccttcccctgaaagctatcattctattttctgtctcttgaattttactactttaagcaccttaaaagtgaaattgtcggccgggcatggtggctcatgcctgtaatcccagcactctgagaagccgaggcgggtggatcatgaggtcaggagttcgagaccagcccagccaatacggcgaaaccccgtctctacaaaaaatacaaaaattagctgggcgtggtggtgcatgcctgtagtcccagctgctcaggaggctgaggcagaacaatcacttgaacctgggaggtggaggttgcagtgagctgagatcatgccactgcactccagcctcgggaacagagcaagactccatctcaaaaaaaaaaaaaaaaagtgataatgtaagaatatttgccattttctgactggcttatttaactgaggataatgtcttcaagggtcatccttttttaaagttttttcaatttttttaacaattttttaaaaatagagacagggtctccctatgttgcccaggctggtcttgaactcctggcctcaactgatcctcccatctcagcccctcaaagtgttgggatcacaggtgtgagccaccacacctggcctcatccatgtttagcatgtgttaaaatttcttttttcaggctgaatatttcatcatgtatgtacacatgtgtgtgtgtgtatgtacacatatatacgtggataaatttatccattcatccatcaatagacacttgggttgcttccaccttttggctcttgtgaatcatgcttctatgtatatgggtccatggcatggttcagggtccatggcaaaaacgcactcaacgcccagaaaagaaaccatgggtgtataaatatctcttcacgcccctgctttcaattatgcttggtgggcaaatgaattcataaacccccaggcacagtgactcaaagtccttctctaactcaaccttctgggagcccagggctctgcttccttgacctcgatgatgcccacaccttatttacctcctccatctcaccactcttcttccagctcccttgggaactctctcactcaacctcaacaatgtagaacagtgactctggaatccctcctgctgccagacttgcccctggctcctccctggggactgtcaccttgcagaccactggcttgtcagggcagtgaagggccttcttgggtagaccctccctgcccgctaaaactggcctctacaaagaggcaatgggccatgtccccatcatggctctgggccacgggatacacagtgatggcaccaggctggccatggacaggaacattctggatgtctggtctagggaccactgtccccctgtggctagaacggggggagtgatcaagctgataaaaaggtagagtccagaggccgggcatggtggctcatgcctttaatcccagcactttaggaggctgaggtgggtggatcacgaggtcaggaggttgagaccatcctggctaacacggtgaaaccctgtctctactaaaaatacaaaaaattagccgggcatggtggcgggcgcttgtagtcccagctacttgggaggctgagg[132 bp omitted]tggctcatgcctgtaatcccagcactttgggaggctgaggcgggtggatcacgaggtcaggaggttgacaccatcctggctaacacagtgaaaccccatctctactaaaaatacaaaaaattagccgggcatggtggcgggcgcctgtagtcccagctactcgggaggctgaggcaggagaatggagtgaacccg[149 bp omitted]tgaaaatatgttgtggatgggagggagggactgggagcccacatacctcagctcctcctggggatgaactaggctgcacaccaggtggggaatgtgtgtggtaggttcatttccttctatgctcctccttctcttcactccagcccccaacccccccctttttttttttttttttttttttttttttttggagacagagtctccctctgttccccaggctggagtacagaggtgcgatctctgttcactgcaacctccacctcccaggctgaaatgattctcctgcctcagcctcccgagtagctgggattacaggtgcccgacacgatgcctggctaatttttgtatttttagtagagatggggtttcaccacgttggccaggcctcaagtgatccgcccaccttggcctcccaaagtgctgagattacaggcatgagccaccgcacccagcctgttatctctctttttttttttttttttttgagatggagtctcactatgtcacccaggctggagtacagtgccgcgatctcggctcactgcaacctccgcctcctgggttcaagcaattctcctgcttcagcctccagagtagctgggactccaagtgcgcgccaccacgcccggctaatttttgcattttttagtagagacggttt[132 bp omitted]cctcctttgcctggtcagtgtctacccattgttcagagaagccttccctggccacccccataactcggtgggaatcctgtgcctccctgctggaccctcccacccctgctgcccactgtaatttcgtttgaagatctgtctgcccaagcccagcaaactagatgcccccagacagtgacaaggaaaacaaagatactttgaagaccatgtcctcggacagattcagagtccacgacagaaaggcactcaacacccaggaaagaaaaacagagtttggggctccttggctcctgggtgagggtagtggtgttcccagagaagccagtttgagagtggggatctagcgcttcagggctggccaaggccgttcagccagtgttgggatcctttagggttcaatctatctcttcagaagttgcctgatgggatgcgggcatggagagcaccaccatagggtgcccggctgggtgtatgggggtttgggggtgcagg[132 bp omitted]tgaaaccccgtctctactaaaaatacaaaattagctgggtgtgggggcgcatgcctgtaatcccaggtacttgggaggctgaggcagaagaatcgcttaaacccaggaggcagagttcgcagtgagctgagatcatgccattgcactccagcctgagaaacaagagtgaaactccatctcaaaaaagaaaaaaaaaaaaaaaaagaagtgtctggtccctggggaggagacggcgcccggcagggacagtgggcctacagctgacctgtctgcttgctggtgggtttcctgctgaactcctctctgggtcagtgcgtctcactgtccacctgtccctgcatccccttctgtgcctcgctggtcatctttctcccttggcaatccacttcatacaccacgcctcctccgtctgccatctctcagtgccacgctcctgcctgtgctcccatctctccctggttttgcccctgacacgccacctgctcgcctctctctaggtccatctgggggtctccggccgccgctgacccgcctgtccgcaggctgagctactcggaccacggagcgcgacggggaggcgcgactgcggctcagcaaggactaagttagcaacaagacactcctcactgtgcacgacatggtcgcgagcacggccatcaagtacgccaacaacatcgcgcccggctccaacagctgccacctgctcacctacatcgagtaccaccagcagtgtctcggcgtcgagaagtctttcttcaaagtaccgccaggcggtccgcgcctgcgcgcccctcccgcccctcctgcgcctgcgcgcctcttctgcacccaccctcttgcgcctgcgcgccacttatttcacctcctgcgccagcgcagcgctccagggcctttcttcccccgcccctccccgcgtcctgcgcctgcgcgcctttcttcccccggtaagcctgcgcgccgctccggcccacttgcttctgcgcctgcgcgccgctgcagggccttcctcccccatctccccccgcctcctacgcctgcgcgccactacatcccttctgcgcctgcgcagtgttactctcctgtgactgccacttgtctgactcgcatgtttgttttaacggattccctgaggctgcctgagagccagaaatgaaaagctgcagacttaggggccctggttcagatcccagagcagccattagctacgttttcttgcacgaaaactttgtgcctttgtgcctctgtttccctatatgaaaactttacatataaatatatatatatatataaaggccaggcgcggtggctcacgccttaatcctagcactttgggtgtccgaggcaggcagatcacttgaggtcaggagttcgagaccagcctggccaacatggtgaaaccctgtctttacgaaaaatacaaaaattagccaggcatggtggtgcatgcctgtaatcccagctacttgggaggctggaggcaggagaatcactccaacccgggaggcagaggcagtgagcccagatggtgccactgcactccagcctgggcaacagcagagcaagactgtctcaaaaaaaaaaaaaaaaagaaaagtcattccaatacccatagtaaactggatcctccggtaaaaataaagttaaaaaaataaaaaagtaaacatataaaaatatgtattattatatatacatttaaagtatagtttttataaatgtacagtatataaaacgtctgtttatggataaattttatgcgtgctacacttttatttatttatttatttatttttga[134 bp omitted]cacgcccggctaattttttgtatttttggtagagacagggttcaccgtgtcagccaggatggtctcgatctcctgaccttgtgatccgccctccttggcctcccaaagtgctgggattacaggtgtgagccaccgtgcccggcccttttatgttaaatttaatataaaatattttcttttatatcagcatttttatgtaaatatataaaatataacagcagctagctcacagctttgctgcatggattcagtgagtttacacacatcgaatagctctggcacacacaaagcattgcaccagcattcactatttattatttttatggttttgtttgtttgagacggagtcttgctctgtcactcaggctggagtgcagtggcccaatcttggctcactgcaagctccgcctcccgggttcacgccattctcctgcctc[212 bp omitted]cagtctctcactgtcgccagggctggagtgcagtggtgcgatcttggctcactgcaacctccgcctcccgggttcaagcaattctcctgcctcagtctcctgagtagctggggttacaggtgcctgccaccacatccagctaattttttgtatttttagtaaagacgggggtttcaccatgttggccaggctggtctcaaactcctgacctcgtgattcacccacctcggcctcccaaagtgctgagattacaggcatgagccactgtgcctggccattattatggtttttactgtgtctcttctccagtggcatttcctcagcgaggtctttccttgctaccctggttccccgaacctgccctctt[137 bp omitted]acatggtgaaaccctgtctctattaaacatacaaaaaaaattagccaggcatggtggcacacctgtaatcccagctactgggaggtggaggttgtagtgagccgagatcatgccactgcactccagcctgggcgacagagcaagactctgtcacaaaaaaatattcttcccagttttcatcatcatggctacaagttaccaaggtcatttgtttatttggtcatttccttgagggcgagaggccagattgccttgttgttgtaccagcgccaaccctctgatgtttgttgaattaatgaacacccatttttcagatcaggaaaggggataagagacctcctgtgacttgttctgtcaatgtaataaacaagtaaattatgcaataggtaagacagtgttcagtgattcagaggaatccaaagcacgtaaaggagtaaactgttgaggtgggggcagaatttaaaagtatggcggctagccaggtgcagtgcctcacacctgtaatcccagcactttgggaggcag[134 bp omitted]gaggcagaagaatcacttgaacccgggagccagaggttgcagtgagccgagatcacgccactgcactccagcctgggcaacagagtgagactctgtctcaaaaaaaaaagaaagaaagaaagaaaaaggtggctaaggagagcctcactgagagaaagtgatatttcaacaaagacttcaatgaagagaaaagatctatgggatggtgttccaggtcaaggggagtttgtgcaaaggccctgaggcaggacagtgcctgctgtgttgaaggagcagtgaggaggaggcccctgtggctggagcagagtgagggagggagggggtggggaaggttgagaagtgcctggtgggccttgtgggggacttggcttttacccgaggggagggggagtgggagccatggaggcagaggagggatatgccctgactcaggtgctcacggcgctctctggctactgtggggaggacagactgaggggaaagagaccagctgagattgagatgatgatagtttggaccaagatgtagcaggagagagggtgagaagcgttcggattctgaaagcagagcccacagaatttgttggtgtctcagcaaaacccgctgagaatgaccaaagttttctggtcagtgccacttgaaggatggagctgctgttgtctgagattatggtaggttggagtggagggaggagatttagggatgagggctgtgggtaacatccctcccctagctgggctgtttgggtttgagatgcgtgttagacgaggaaatgaggggtgggcagttgtatccaagagtctggagtggtggggaggggctccacctggatccgatggactcacctgagtgaatggaaccaagagagttacaccatcttaaattgtcaagtcgatccatatgtcggcacagataatcacagtgcataggcaaagcttgagctaccagggcgttcgccccaacattttatctaataaaagtgaaaccaggctgggcatggtggcttataccagcctggacaacatagtgagaccgccatctctaaaaaatatgaaaattagccgggcgtggtggtgcatgtgtagtcccaactactcagaagcctgaggcaggaggattgcttaagccaaggaggtcgaggctgccatgagccatgaacgcaccattgcactccagccttgggtgacagagcaagaccttgtctctcttttttttttttgagatggagtcacgctctgtcacccaggctggagtgcagtggtgcgcggtctcggctcactgcaagctccgcctcccgggttcacgccattctcctgcttcagcctcccgagtagctgggactacagacacctgccaccacgcccggctaattttttgtatttttcatagagatggggtttcaccgtgt[133 bp omitted]acaacaacaaaaaaacccagcagccagagcctacataagtatcagccaatacgggggatgattaaatcatgtcatctctatactagatgatattatgttagatttgatattgcagagaaatatttaaagactggggaaaacagtcaagatgaatggttttgtgaacaaaggcaggtcttgataacgtacatgtagtattgccctggctctgtaaagtatgcatgcttaaaaatgtcaggaaggtattttgtttgtatttttttttttttttccgggatttctcaatctcagggccgttgtccttaggggccgaatcattctttgtggtggagaatgtcctgtgagtatctagtttccatcaatgccagtggcgtttcattccccgagctatgacaaccccaaatgtctccaagtatttccaaatgtcccctgaggaacagagtcaccccctggctgagagccccagttctagatgaaagtgtggttgcttgtcatgagggggatgggttattttatcagagaaaacaacagaagaaacaggacaagagaggtgtctgtaatcccagtgctttgggaggccaaggcgagtggatcgcttgaacccaggagtacaagaccagcctgggtgacatagtgagatcccatctctacaaaaaaattaaaaattaaaaaattagccaggggtggtggtgtacacctgtagtcccagctacttgggggactgaggcgggaggattgctggggctgggggaggttgagactgcagtgagccatgattgcgctattgcattccagcctgggcaacagagcaagaccttgtttcagaaaaaaaaaaaaaaaaaaaaaaagaagaagaagaaagaaaaagaagaaacaggcgacagagaaaagggagccaaaggttctcagcctgaggctcccgggcaggtggggcggggatggctgagcctcctagtgcctcacgaggacctccctcccctagctgggcctggagcgcttccacagcgtgggaatcatgggtctcaactcagaagagtgggtcatcgccagcattggtgccatcatggcagggtaaagggcacgcggcctctccccggagtgttttgcgggcaggaagccaccagcccaccttctatgggatcccaaggaagagtcctcaggacagggagctgacaagagctcccacttaagtctacgcttagtgggatttttcaatggcccagtcctgagcatgctcagctcacctttccagacagtctctatctagtgaactcatatacatcctgtgaatccccgcattcatgtcccctcttccagaaagccctccccacttcttgaggctctccagcactgagccctctctccacccatccagaacattggggaaccccttgagagcaagatccaagcctgaactgtccctgaattccacctcccaacagggtatgttgtgagtgtcaggtactggggattcccaggaaccttgcactcacccagcagggagtagctgggattacaggcatgcgccaccagatccggctaattttttttgcatttttagtagagacagggtatcatcatgttgtccaggctggtctcgaactcctggcctcaagtgatccgcccgcttcagcctcccaaagtgctaggattacaggcatgagccaccacgcctggctgatatcaattttaaataataatatgctaagagctctaatggaaaaagcagacagaacttacaacaggtgggttcttgtaagcagagatggaaactctaagaaatcaaaaggaaatgttggtcatcaaaaacactgacataaaaaaagcatgcttccaatgggctcggcagtggactgaatacagccaaggaaatcttgagtgagcctgaagctaggtcaatagaaacatcccatgctgaaaatcttaaagaaaaaaagaggccaggcacggtggctcatgcctatagtcccagcactttaggaggctgagtggggaggactgcctgagcccaggcactcaaggccagcctgagaaacttagcaagaccttgcctctatttaaaaaaaaaaaattaattaagaagaaaaaagaaaagacaaaaacacaatgaaatgaaatgaacaaatggaaaagaaccgcgggacaatacagaaagtgtaacatacacataatgagagttggttacagatctgaggccgaggccggtggatcacctgaggtcaggagtttgagaccagcctggccaacatggtgaaaccctgtctctactgaaaatacaaaaatagccaggcatggtggcagacacctgtaatcccagctacttgggaggctgaggcaagagagtcacctgaacctgggaggcggaggatgcagtgagccgagaccgcacgactgcactccagcctgggcaacaagagcgaaactccatgtgaaaaaaaagagaaagaaagaaaaaagaaaaaatcactgagaattctccaggaactcacaagtatcaacaaggagacgtttaaaaaaaattaaggccaggtgcagtggctcactcctgtaatcccagcactttgggaggccaaggtgggaggatcgcttgagcccagaagttcaacaccagcctgggcaacatatcgagacctcatctttacaaaaattaaaaaacaaacaaacaaaattagctgagcctgatggcatgtgcttgtggccccagctactctggaagccatcgtgggaggattgcttgagcctgggagggtgaggctgcagtgagccgtgatagcgccaccccatgccag[143 bp omitted]atggtgaaagcccctctctaaaaaaatacaaaaattagtcgggcatgatggcgggtgcctgtaatcccagatatttgggaggctgaagtggcagaatcacttgaatccagaaggcagaggttgtagtgagccaagattgtgccattacactccagcctgggtgacagagcgagactccgtctaaaacaaaaacaaattaaaattaaaacgtcagaacaacagataaaaatattctgaaacataagcggattcatttatatgaagaaaaaagcatgcaagaatatctgggaaaattctgaagcagaattataaagggaaactaccactaccagactttttttttttttcagacggagtttcactcttgttgcccaggctggagtgcaatggcttgatctcggctcaacgcaacctccacctcccgggttcaagcgattctcctacctcagcctcccgagtagctgggattacaggtatgcgccaccacacccggctaattttgtatttttagtagagacagggtttctccatattggtcaggctggtctcgaactcccgacctcaggtgatctgcccgcctcggcctcccaaagtgctgggagtacaggcgtgagccactgcgtccgggcacactaccagatattaattaggtcacacagtggcagaaatgtaaaggtgagtactgtgcatatgagggaagccagagagagacacaaacgtatgcaggaattgaaaaatgcaaccaaagacggcatctcaaataagtgaagacaggttattcaataaatggggtggatcgccttgcatagctattggggaaatagagctggggccctacctcatggctgaataaattccagatggaacaaattgaaatgtgagaaagaaagagggaagggaggcaggaaaagggggaagaagaattgaattcctaggagaaatcatgggagaacttaaaataaaaacatcctaaataataaacaataacagcccaaaaaccatttcaaggaaaacttgatcacttgataatggatcacttgaggataggagttccagaccagcctgggtgagagtgatagtccatctcaaaaaaaaaaaaagaaagaaaaagagccaagcgcagtggcttacgcctgtaatcccaacactttgggaggccgaggtgggtggatcatgaggtcaggagttcaagaccagcctggccaagatggcgaaaccccgtctctacccaaaatacaaaaattaccagggtgtggtggtgagctcgtgtaatcccagctactcaggaggctgaggcaggagaatggattgaacccgggaggcggaggttgtggtcagctgagctcgcaccactacactccagcctgggtgacagagcgagactccatctcaaaaaagttaaaattaaaaattagaaaaaatcctgggcaactcggcttgctgaggcagtttctttatctgtagacagggatgaagcagtgcccacctcacggagtgcttgtgaagagtccatgagacaactcttagggaaagcctgactacattttttttttttttgagttggagtttcgctcttgttgcccaggctggagtgcaatggtgtgatcttggctcaccgcaacctctgcctcctgggttcaagcaattctcctgcctcagcctcccgagtagctgggattataggtgcctgccagcacgcccagctaatttttcctatttttagtagagacagccttcaccatgttggttaggctggtctcaaactcctgacttcaggtgatccacccgccttggcctcccaaagtgctgggattagaggcgtgagccacctcgcccagattttttttctttttttttagtacagggtctctcctgtcgcccaggctggagtgcagtgcagtggtgcaatctcggctcactgcaacctctgcctcctgggttcaagagattcttgtgactcagcctcccaagtagctgggtctacaggtgtgcactgtactttaggctaatttttgtgtttttactagagacagggtttcgccatgttgcccaggctggtcttgaactcctggcctcaaatgatccacccgcctcggcctcctaaagtgctgggattataggtgtgagccaccatgcctggccagaaagccctaccacgtttttacacatccatagtccttccactgcaccttggagggtctgggaaccctgaaggaaccactgtagaccttctttcactccatattcttactttaggagctcagacccaaaaccataccccgaaggcctaaaagaacctttctctggtaaggcacggggcagggaaagccacactctgatgctgggaatggatcttttggttccagagtagaagggagaagacatgctccagagtccccagcgctaagctgagcccagctgagtccccagctgctgcctgctgacaaaagtgatctcaatcagtggctgccacggtgatcctgtaatgtgggctgctcaggaatggaactcctgctcctctgggtggagctggagctggagcacagaggggacagatctgctcaaatggggccagtgacagctttgtctcctggaggttcactgagctctgccacactgaggccagagaaaaacccaccagagggaaactgggagatggcacgctggctcctgggaaaaaatgtctttgcctacatttttatttccgtccatccaaccatccatccatccatccatccatccatccatccatccatccatccacgcatccatccttccttccttccatccacccattaacccatccattgatccacccatccattcattcttccatccactcacccatctatccatccttcctaccatccatcctttccatccatccacccatctgcccttccttccctccttccgtccttccctccctcctttcctcctttccttccttccttccatccacccatcgatccatccatccttccatcctttcttccacccacccacccatctattcatccatggtccacccaaccaatcatccactcatccatcaaaccacccatccactcacccacccatctgttcatccatcatccatgcatccaccttatgaaaccaagttttcttctcaacccaaaccttgctgtctgcttccaagtagagagcacagcatcagaagcaggatgtgagccgaattctctgccctcttgaattgctggtagcatcgtctccagccttgctcacactccccacccccaccaggcttggtcccaaccctccttctctgttttggtcactgatctgggggcactgggacacgtagtcggggcagggggccccaggctacctcgcaagcctgcccactgactggacaggaggaaccaggcagatgcatgcgtctgctttcccatctgactttatttcactttttttttctataaaactcctccataatttcacaatttaacaaaagtttaaaatccaggaaagaaacaatcctgtaactcgttacaaacacgattctccttattccttttatccaggagttggtctcgggccgatgagtgtcctagttcctagtgagacacgttctttgtaaaaacccttatgggcaagaaaggtattcgataccatttgctttccggcgtcggtttacatttttgttcaggagagagcaaaacacagagatttgcactgggggcaggcggcttaacaggaaacacgtggcaatcacaaagtgccaggcccctttcctatggaagtgtccccagagccctcgtgggcccagccgccgggcagctggggtggggtgggagagcagctggggatgctgccttgggagcccatgctgcccagcacgtccatcaggtggtcacggagccagccctgggcccagagcagctctggaggacaacgtgaggccttccggccagaggaggtaactgagaactgggttggtgcttccggaggccttggaaacggcaggaagggccagacgccaccaccgagagcaggcgggggagcccgaccctcctctggctgagtggaaggctgctcgagtcgctgtgtggattttgggggactcctgcgaaggagaaaggccagcaccctgggctgaggttcctgtccgtgaccccggcggcctcttgtgcgtagagctcccagcagcacgggcccccggtcagcccccctcaggccagttccttcagtccaatgtcttagtttccagagaagaaaggaagcgccccatggtggagtattgttggccgccctgggaaggggagagggggcacaggggcctgccctcttcctgatacctgaaggcagtggggccgggagagaaacagagcaggtggcgaggagtcccggaggcttcctccgaaggttctcgggcctttccccgagagttctggggagtttccccaggacagctggcattgggggcagccttggaggcatgggtccccaccaaggagtgttcaggatctgctgacagaatcagagcagggacaagatgagggacctcagggagggacagatggagccccccaagtctgaactcataggctggggaggaggagacatctaggtgggttcgagggggtgcgagcccacctccaggccctcagccctcttttcctcataacttggtcagggcacaaggacttgaaaggacttgaaagtcagggggttgagaggactggaggcgcctcgagtcaatgtctgggaaacagaggctaaccaggcaggcctccagcccctgggacccccagccacgatgggctggctccgcgggagcgtcctggccctggaagagtgggccgggaaggaggaccggcttggcccctggagaatctcaggcataccaggagtggggctgcgggcgcggcaccagcatgaattgcggcggtggaggccggggcgggccaggccgcgaccagagagaaaggcagcctgggagggccagcccggccaacccaccgggcctgctgatggccgagcccacgctcgaggggctgaccagagttcaatgcgcctcagaaaactccataaactatcccgtcttatttggcaaaagctcatatttttttcaaagtttgaagacttgaatgaaagagaggaagaggagcctatgggaggaggccgagccccagggcggctgatgcgagtctgtccgcggagactgttggcgctagtctgagtagagcccgagagcagactggtggctcccgggcgccctgaggactcgctgccctttgtagtgttggctgacccccccgggagccccggtaggaggcggcggcatccttggaacggcaaagggagaattcctccatgcgcctggagagggccagctgccgtgcctggctcggcctccagccccacaccaccgcagagacatcttaacctacaagccccaccgtacgcaccccccacccaccccacgtgcactgctgccacagaaacgcacatggacactgctcttgaccagacagtgcacacacatatataatagagagaactatacagcacagaccccagcgcagcgcgagccggggaggagccggcgctaggtctacacggaggacgacgcagacacacaggcagggccttctgaggtccagggtgggcggagggtgtgttctgaaccattcgggaggctggagatgccccccagccgtcgatccgctgctcagaaaggctggggcagcgacgccgcacagcccgccgagcagtgggggctggtcccaaggctgggcgaggggcccccggccctgtctctgcccagagctgccttcaacaccagccgctctctgaggggagcccagagagcccggggggcggctcccgtgtggcccagcccggccccagggctcctggcgatggagcggggagagtgggcagggagccgccgaggaaagtgcagcgggctgtgcgggcgaggacagggctgtcgctaaggcagtgctgcgggcaggcgagacgggagaggagggcaggcgaggcctggctgcagcctcccaggaccccggcggtgggggcccggcacgcggcccagggtcatgtggccacggcctccaggcagctctgcagtttgcgcacggtggtctcgtccagggagaagaggtcgaagtcgaaggtggtgttggtgacattgaagtggccagtctcctcgatcagattcacaatctgtaaggtggtggcaggtggcttcaggggcagggggccaagggtggggttgccctgttccctaacagaggtaggggctcctggggcagcaccaggggcccccgcagcccacactcctcacaggcaccccgacctctgccgggcaggaccctcaggggggcgatacctgctgcagcacgttgcgctcccgcagcgccatcagcctccggtgtagctccaccagctcatccgtgtaggcctggggagggggggcaggtctcagcagcgtgtgggggccctggacccttcctgctcccatgcccagccccacccatgacccagtccatcccagcacaggacagaggtagccacatccaaaccaaggaaggcccaaggctgcaggggcagcccctcagctccaaggccacaccgggaggggaggaaggactgtccctgctcctgcccaggaagagtccaactgtggggtgttggggggctctggggtcctccactggctgcaactcccaccacccacccctccgtagcctccccgccttgtcgtaggtgcccccccaccttgtcgtaggtgcccttcttgaggatcttctcaggcttgctgcaggactcggggctcctccggcctgacacctgcagggaacccaggtctctgctgagctgtggcccacaccctccccagccccgaaggccccacaaaccctcctaggacagcccggcccagggctaagcccggcctctggtgcaccccctgcctgcaggccccaggctcaccttgctgttgggcgggggtggcttctgggggggtgggggctcacggctgggcagggaggagtcggcgctgttgtcactctcgctgtcgctgaagctcaacctgaaccgacacacgggggcgcatcaggcccctgccgccaccacggcccccaccccacccccaggctcaagcctctgccccgcacggagtcggtgcctgagcccacacacccccaacagctccattcacctctgcgcaggaacctcaacttaaaaatactgtgtgtggccaccaagaggaaagaaccccaaggaaaccaggccacccagaggccctttgggggccgcccgagcaggccaagagtgctccgggatacccgggacacaaagccccccagccaatgggccttgctgggctgtggtcctctgacttggttctgtggctttaacaaggggaggaggagctgcctgctgaaaacctgccctcttctcccagcactgccctagggcttccatggccgcccgtccctccgatgctcccctggccgcctgaccctggtttgctctggacagcaggcctccatcagtcacatcggcccccctgaccctagagggtgtggtcctaaacaggggtatctggtggtggggagaggtccaagctctcaacctcccctaccctggggggcaggtctttgacctctgcctcagtttccccatctgtgaaaggaggctgctatgaccacacacagagcctgggcccatttttctctcactctgcgtgcctggggtcccgctctgccagggatattttgggcttgatccagtgagaggggcccctgacaaccatcacttcacaacacgtttaaaacacagcaaaccccaggcctcctagtgaacaaggaggtgccagaagcggctcgagcacaccggacttcccggtgggcagcacagccattgtccctgttcctggcctgctcctgccccggcgcaggctccgttcatctcttaaacttgcccctcagtggcctcaggctggggccactctctgcagctgcctcccggctctggcagctccaggtctggctcacgttgcccaggcgacgcccctgcctgtgctcctgccggcctctgccccgcatcccacaggtgactgggatgacggctgggcaccgctgcagactgggcttcccaggcagcagaccagggtgtgcagaagctccgacggtgtggcctgggcgctccctgccccggcaacgcagggacaaggccggcaagccctcacccagggcccacacaaacgttccgggaggaatcaaaaggcgcttcgcgtgtggctcggtccctgtgccgtgcctgccagcccctctagaaccgaaccttccgtcagcctctctgcgctcacggctcttggcgcaagcagaatccaccctgaatgtcaccgaacgaggcgggagcctgcttccaggtcctgtcccagggacgccacagccctcctcgtgtctagagtctaagtccctgtcggagtcgtgggcccggacctcccaccagcggctcccccgcagtgagccactgctcctgctctgtctgcggtgggtgggaatcccgccatgtgcctgctggcctggcgcgctgcacacggggaaccaagcagaacctgctgcccagcttgcgtgaaggtggctttagtgaacaacacacctgcaggcgtctgtgaggctcccatgcaccttgctgggtgcagggtgataaccagccctgtctccagtaggagccactgaggcctggaggcctcagcctcacgggaggaggggctgactgccggctctgctacagctttggaaaagcctggacccccgcccgctgaagcctgtgtgcccggggccaaggccagcacgttctccactgtcgctgggttggaggccgagcgcatggagctctcccaggtggggtcacgccaagggtcctgcatatcccaaggatgtgcctcggcacccctgtgcctcctggggaaaaggccacaggcagccaaagctgctcccacactgggtgtccgctgccccaggacgggctctccatggatcctcgccccatgtaaggcaggtgggaaaggactgggagtctcctggcccaagagcagagaaacaggcctgctcccctccccccacctccagcctgggctccctcctgcacccctccctgccagatagcccacacctgccagtgaccacgaggagggatgccacccaaggccccagatgggggcagcccttgaggccctcagcctcagggaccaggagaggacacacagccccaggcccaccccaaggcccaggctggactggggccacctggggatggatccctgctttggccctcccaggggaccctccagtcccaaccccacctgcagccccacaatcactgcagacccagccggagtcgccccgggtggccgcctccgccccctggctcccaccgggccgtcacctggagtccctccccgggttggtcttgccggcagcctcctcgcctgacgaagagtcgtcctcgtcggactcctcggactgcaggtcctccaccatggagcgcaggggtcctggggaggcggggcagggagggaggggagacaagggcagggctccactgagcctccagggcccctcgcccatgaggccacgcagagcttcttgacactggtgacccccaaatgcacacgcccgtccacctgggggtccctgtgcccatctctaagaactgcccccacaccggcagccacccgcttcccctagaacgccctggctcccccacccctccctaccttcctggccctgctcgcaggcctcaggggactggccggcagtgggcgcgcagggcccctccattgctgcagccggaggagaacccctcctctgctcggggcacagagatcagaagctctgccgagagcccagggagggcgagggagccacagcctggctgggaagctgggcctggggtcacagatctctcttcctgcaccctacgccggcctgcccaccccctcggtaatcccctctgctgctcccagtccaccgtcctcccctttctccagaggcacacggttccagtcccctacagacggcatcttggtttatattcctgttaccaaggcaacagagggacacaaagccctcaattaccttagtcacatgatcccgcttcagtaggtccccctcccttcccggcagataagaacacttggagcgagtgtaggcttcaagggccccatcccccagccccctcggcaactgcacggctgaattccaggccagactccctccacaaccccgcacactcctctcccccagcccccctgcaaaggattccaggccaagggggaaggaggctcttgttccaatccaggagtggaaacgctttttgcctgggagtgggtgctggggtctggactggggccgggggctcagggcagctctcccactgtgtcctgcaggctgcctggtccccagggccctccccactctggggcaggctggtgcagccaatgggcctatgtcctttccccaaaaagccgcccctactcagggtggcctgcctggagagggagagggcactccaaacactccggcagcaggagaccccggccgtccacaggcagccagtgcctcgctggccctggggagcgggtgggatgggcggaggaggtgacgccgtccgtccatggtccccagcagcacagggagagttctggccatgggcagggccctcaccagaagcccctcaccagcctggctccaggcacggggtgcatgccaacagccaccacaaggaacagtgcccccgggcctgactggaggtctggtgacttgttcctgctttgcttttaaatatagactcccccaggccaccaaaaccctccatgtacagatctgcagggcccagcctgtgcaggcagtggacgctgaggaatgcccatgtggcctgagctccaggccctccccggccccatccgtgccccccagctgctctccatacacaccttggctgtggttctgggatggctcgaagtctgagtctgagctggagtctgagctggagctggagttggacgggcttgactgggcagacttcacccaatggtgggatgggcagggaggggagaaagggagagctgtcacctttcagcagagacaaagggggccccctggcagcagctacgctgagtgggtctcccccagacacccctagggtcccaagggtacccacgtgtgccgctgagaacccactaaggagccagcggccaggccatgcgcagcctatagcctcccgtgccagccctaggacacccgtggatgtctgggtttccggtagcgccaggagaccgtgtggaccacgtgggctctcctgtctacccaggcaggtgcacagggtactgggagggaggctggggcaggggcttgaagtcccacaggtgggtgggccttgccttcgtccaagagggcaggcattgactggtgtcgcaaaaatgtctggaacaggaaagctgggtgtggacacttcttgttctgacccagtgctgtccggggctcaggggtggcagagagctctgtatccccacccattcgctgctcctaccgccagctgcccaagacactgaagagcgtgcgtgcacaggggacagaagccatgggcaagcccggccccacccgcctcctcctcctgcagctgtccttccaggctcagccaccagggggcagtaaaagccacaacaaggacacaaggggtgggatgccaggacagagggtgacagtgcagggcaggcgtgtatggggcagaggcgtagctcctgggtggacgggaggcaggcactgcagacacctgcacggggaggggcccattgttctgggcccacatttctgccaatgagctcatcccaaggggtgtgccagaggacatggcgggcccagggcagccccctcaccttgggggcccgtctggtggaactaggtggcttgagcccctcagaccagtcccctccagggtcctccctccatcaggaggaggcagctggtctgctggattctggcaggggccgctgcagccgccagccatgcaagggaagccgtgaacggagtactgagctggtgggactcaggaccttgagtgcctgggagcccccggcccctcccctagcatgtggaggagacagcctccaccctgcagaagggtccccacgaaagcccaaggcctccccaagcagcaggtccagactcacccgtgcctgagagggaagagggacttcccaagggtttactgcagcccaacccagccccctcctgcccctcaaaccagcccctgccagcgccccttcccaccaacacatggcgctccctgatgaatcatcactgggaaagcctgccgtggtgcccatcagtcactgcccactcaggctacctgagtcccggacacataccccagagcgtccaggacccctggctgggcctgcctggagctgggtgatgcacagcctggacttctgttcttgggggccaggggtgagtaagaggtgaccgagagatggcctatttaaccccagccttctaaccagcaggccttgctactcagaacaaggccgtcctatgtcagcctcagttttcccagcaccgccagctgcctgcacaccgaggccaaggctagtcctcccttgacctccggatggaatccctggggcagaggggtgggcaccaacctggagggaggtggactggagaagtatccaaggtcctggccccatatcccatgcactttctcactaaaggtggagagggggcagttcaggcggccaaaggaggctgcacaaggtcagcagggatggaagcagagaggatgctgagccccgagaggcccccaagcctgtcctggcgccgtgccagacagaggaaagccagtcaggcacacgcatcccctttccttccgcccaaatccaaggggcagggaggaaaagaatccggaaatggtctcagccagaagagccctaaggtggtgtgatcagaagggccaccggagcacgcccggggctcagagggagggcggagcagactgggtccacgactgactccagatccccaagggccagggagaccccaaggcagcagctggaggacgtgggagctcggctcggggactcggcccaaagagtggccctacgagggtgggcgtgggccagaccccagctggtgcagattcttccgatggccggttctggtagcacagccacacacagcctctggggaggagcagcccaagacggccaaggggaagccaaggggccagtggtctggaaggccgatgtgcttcttcaccatagcagcctgggcttcggtgaagcccccgggggaagaggcgtcagggactctgtgctgttggggcctgggtctcactcccgcacagacctcggggcgctaagccgcattgctcaaaagcctctcagcacgcggggcgctcttcttcggccaggaggaagtcccaaagcctcctccagcaactccagcctcaaggccacccagccactctaagcagcggcgtccgaggtggcaggaagctccccacaaaatattccagctgtttcacaacactggtggcgggagccaggagccaactcactcactgccgggggccaggccgggtgagcagagcggagtggagcgggccgtggagctgccttgccgctgcccagcgtgctgcacacccagccccaggtaccagaagacctcgcctggagatgcctggcctgggactgcatgtcactcagtacctatccccaaccctggggtagaagggaggggacaagcgcctgcccagggctgtggttgctgcacaggcagagaaggggtcaggctcggtgcccagcaggcaccgccaggccctcccacagctgggagggctactgagatgggccgggacttctggaaggtggcaccggcccccccaccgcctcagggtcatagcagatggtgccgtcttcagccactgccaagccatgggagcaccgggcactcagccttgccagcccatgtgtctatgagccaggatgcactgttacccagaggctggaccgtcacccccagccagccccaccacctccatgagggccctgggggcaatgagcgctgcccacataaccccctcgggctttgtggctgggacctgcattcaaagccccagcggcttttcaaagcctcagcaacccagaggcaaagcttccttgagggcaagccggacccacaaaaggcccctgagggctggggctggcaacagaggtaaatggcccaaccctcatccatccattcattcatttttaccgggcccagtgtctgttgtctaaatgccaagtgccagataatagcgctggaagacaccaccgccgtcccaggccccaaacagggtctggccacaagaccatgaggtggctaccagctcttgcggctcaagtcatgtctgatgcagtcctctgagaatgtccggacgctgtgctgtgggacaagccagcagcctctcatggtgacaaggccggtccctgacaggggtcctcgttccaagctcagacactggtggggccagatgtgagtatccccaagtcacagctgtgtgcgatgggtgtgggcaggagggatgctcttgaccccaccagccacctaaatagggagccgggcacggacctgttgctcctcatggctaggggctgtctgaagccctcatcattaacctccagacaagggtgagtctcccagatgccctattggcagagctccaggccgggctgaccacgccatggtcagagcaaccatgagacacgcttgcccactggcaccagagcggccaagacccgggcccatgcagggggctgctggaggaggggagctcagaacctcaggaccacaccatcatgctttaccagagccacccacaaatgccaccgaggaggcgaggagggactcctcacgaggcagactttatcacctgacagacagggaaaccgaagcctagtgaggcgtggaggccccaggttacaagaagccagtgggaggagcagctggtgagacctgaggtcctggctcagatcccacctccttccgctgttccagaagggaggcgggtcccaccacactgcctgcacctggctgccctgcccccagcactcactcacctcggacttgaaggaggcctcgtcctctgagttggactcctccacctccagggcctttttggcctcccggggctcactctcggccttcaccttctcccctctggtgctgctcttgtccttggccggcttcttgtccgagaaggaggaggaggaggaggtgcggggcgaggtgcctggagcactccgggaccccttcgagctgctcttcttctgcttcttggcgctgggctttggcgagtcggcggtggccggccgcttgctggaagcccggggtgggggtgggggtgggggtgggggcccacccttgggggacgtgctttccagcttggtctctttcagggccatcttgggttccttgaaggcagccttgggcggtggcgccttctcctccttgggcagccggccctcgcccagcttccgcgaggtgtccttggagcttttggcctgctcacgctccagctccttggaggagctcttgctctcggagtctttgcggggccgctcccggtgctccttggtcaccttgtgtggcttggaggtcttgctgctctccttgttggcgtcctgcaaggccaagagcagggagggcaaggggagagacaaggtcacgtggcattgcggggcgccctgctccgccacccctgacccctacaaagcataatccacctgattcagcctcagctagagaaactcttccataaagcaaaaaggtaaggcagtaggtgagagttttacatggagctgtccctttaaactactaggaagtgtcagctggtccccggcagctgcaggctaagattcccctcagaattgaactgacattccctgagggattcaagaagagcacagggtgagtcaggcagagcatggccacttcgcccgcacccgcccgccctaacacctcacagctgggcctgggcaagtcagaggctgcgctggcactgcggggtgctggcgggcactggacgcagccctgcccctcatctcagcctccttcgcccagcactcatgctacgtgcgggaagctcagtgcttcctgctcggtcactcacgggcttcctttctgagccccgtcggcccctctccccaggactccacacccccagggtccagccagctcaggcctggcttcgggaagccaactgctgagcgcccactgggtccctgggtcccaggtaccgcacggagcaaacagctcccgggcttctcagaagggaaaccgcctgggtcgctttcctaaaacaccgaggacattcctaggtctctgcctcggaaaccccgggggtttagggtggagctggactcgggggctgatcccattgaggacagaggtaagatgatggcagagagcagcaggacacaggcccaggagtgagcccagctctgtgacctgcacaccacaggacccaggcagaaaaccgaagccatctgtgcctgcttcctcgaggaagggcaaggccaccacctcactgggcaatggcacaggccaggctggcagcgagcacacagtgtgggggctgccagcaccatggctgagttggctcagcccgcggccagcctgggcgctgctgcttgtatgctgtatgtttctgccctacaccccatccgataggcacactgccagcactccccacggtgggagccacgccttcaccttccctacagagaccctgtatcaccccacgcacccaggagcactgagcaggcttctctgctgttagccaccaggggctccacccttgctaggaaaggagcagcggccagcaggtgcacggcggccccagagcctgtccagacaattgtgtacctggcctcccggcacagaagccagcagcagccagatcccgaaggccctggggaggggctccgggagcagtgagagtaccagggaggaggggggccacgcttcacagatcccccaaagacatgcgggaggggcaggctgggtagaggcctctgaaaaccacctgagtgtccagggacagactcctcccagcaaaaaaccacagggcagacacagctgctgccccatggccagtctcctgggctggccatcttcttgcaaagccacagcccacattcagtgtcaaaggctcaggaacagtaccagtggctgtgaggcctctgccacctccttggagaaagggcaagccctgtgcccagcctggctcttccacctgggacagcgggagtgcccccagaatccccccagctggcctgggccatgcagggctatcagggggtgtccccttgggagctggggtgtggaatggggctgtgctccacagcaagctactacccaaggagggaggtgtgagagactgcaatgccacctgccaccctggcctcttccagcaggggacacacgcccagctgggctgcaggagctcagccggggtcacagccaccaagggcagaatgagagcaaactccaaaggcacgtcagaggcccctaacacaggtctcactgtgtgcccctggcctggagtcagctgagccgccattgccaccagggcctgcctggctagaaggagtcttcccacacaggagcacaggcacccgacaccacaggttctgaaattaggcactacgatttttttgtttgtttgtttgtttgcttttgttttgagacggagtcttgttatgtcgcccaggctggagtgcagtggtgcgatctcggctcactgcaagctccgcctcccgggttcatgccattctcctgcctca[133 bp omitted]actaaattttaagcataacatgagcactctccagggtgagaagccatcaaaatcacgtttgcaaggttgtctgcgaacctccacgggaaagagcaaccaggccaagtacctgacattacatgggtgacacctggctccctgcagctgctgccaggcaaggctgtgagagggtcctgccccctctatgaggctgtggttcctgcctgccacgccactcttgggtggtggctgtgaagtggggacaaaaccccaggactgagtcccctaaagctgccgcagctgcactcaccagcagtcccccggcctggggattctgatgggcaaggccccaaaaggcccacctatcccatctctctgggctcagggagccctgctgaggcccctctgcttggagcacatggcccggccactcactctccaggcagagagccagtgaccaaaggaggtcgctcagctggggaagaggccggttcatgggcctgtgccacccagggctccatggtggggccgacagctcattcgccaggctagggctcggggcagaggggctttctcagaatgccctcagcagacaagtgcctcggcaggaccccatgctgcccgatgctccccacagatgccgcctacatctctccacccggtagctggagaagcctccagggacggagagggtggagcccacaggcctcctaagcctggtggataaactcaccagctggggcctccaggggtctcagagacactccggcaaaagataccaccagcagccccagcagacgcagccccgccagccccagggagggcacctctccaaccaagaagtcctttctacgcagggttttaggtggcttgaagtgacccgtacagaagaaatcttgttgtggtagctgagagggacactgccaagatccccagcaagagcttttccttcattgagcctccacaaggctcagggagagataggccaggaggccgagtggggagaccccagggttccgtttcctactcagagaatctggcaagtctgacgatttctaagacctgctggccttggggaaagagccagaaagacctgcctgggtgctgcggttcttctcccgcatggctgacggtgagtctgtgaggcagctggagagccctgcctgtcctgcctgggatggctgggcccacacgcagggcctggcagacaagtgaggtgaggagaaaggagaggaccggtggagagatgtgtgggtggcaggcaccgggcagctgccccgagggcccgtgccgctcagcctccaggaacggctgtgctgagtgggcagctacagaggactggggcgtgctcaggggttaaagggacactgtgatgccatcaaagggctttctagcttgtcttctgaattgctgctcagggatggtttagagagagaagcctcagaaaggccgagtgccacccacctgaccgactgggccgagatgagaccgtaaaaagtttcttccacactgaaattcagctggcacccacctggcttcccctgcccttcccccacgaaactctgcagtgagccatagcccgagatgcaaagcctggcatagccaagggcagaagtagccccagctgccctcaggagggttgaagaggtgggtagctgcagcctagacagagacactctacccagcggccgccccaacagccttcggcgaaggtctcagggcttcaggccgagcagtcctggggccctgccatcacttggcagaacgggagaggactaggcagggtctctggcctcaagatgaacagggcaaagagcccatgatcacgggcttattcctgaaatcctagggaagcggcagtgcgcagcgaggggtgtgcagagagctcaaagaggaagacgccaagggagcgagcaggtgcggaaggcccagcccagtggagggagggcgccggggccagacccaccacagctgggccccggcgctcccacgcgactgggccttccgcctcactaaccttggagccgtgggatggtttggtcttcttggggtcagagaaggcagagagtggaattgtgggtaacatggggtagtcgggactgggcctggacaccgtgtctgctccttcgggcattaccatcacctagtgacagagaagagacagtcattatcgatgggcagggggcagggggcccacacgggccgggctgaaggtggtggggcttccctctgcaggaggggagaagggagagcctgagcgctttcccgaaagaatcccaggtgcttccctgctggggactgggtgctgagcacgcagaagaagcaggcatgggtggggagcgaagaaaagcccagggtcccaggatggctgggaccaggtggggccacgcggccttccgggaacagtggaccggagggctggcccaagaagacttgcggagcacactgagaatcatgagaaggcagctgcggccgaagcctgacctacgcgcttaggtttagggggaacagctcagaagtgtgagaggccagccagatgcctgcgaaaggcaggcagcaacttcccggggtgcacatgggtgcaactccagtgggtcccacgtgcccggagaatgagccgtccttggtgtgcggtgactgcagcggacccgaacagggcaagagcacccaggctgaggccgagaccaaggcagacgacctgtgcctactgggggggtctctctgcaaagcaggcccgagtgagccagcgagcctgcagcatggggcacctgctcctgcgctccatcagaggctacggatgacgaaagttctggggtccttccaggagggctcccaggaaacacctgctgtgcagggggaagctcggagcaaggtcttgagatatcaacactgcgagttaaggaatgccaccaccacagagaaaagcctcccagatggccgcaagagagaacaaaagaagaaaatacacttcaaaaaaaaagtattgaagtcggtagaagaagcactgctaacagccttgagcacctgcagttcccggccagccaagcctttcatctaaggacactgatgtcatgcggccatggggacattggctgaaaagaggccatgggcccctagggtccctgctctgagctgcttctcagagcctgtctgaccatgatagctcagcactgacagcatgtgtgccccagccgtccctgaaaacacgccacgggaggccctccacactctggagcacgcacatcacgcaagctcacggaggagccacagaaggctgccatgcacagacgggcttgccaggaggctgagccccattcgctctcaggcccattccttcgactctcatggtaatttaccttctttcccctcaaaacaatgccctagactgactgtttcaggatcacgcagtgtctcgctctagcacagaccgttgagaaaaaggaactgggaactgaacacgcagatgactcccacctccaacaagtgctgccaggaggaccaggctccccggcggaaacacagaccctcagccatgggggcagagacaagacacggtcctaaggggcacaaggctggaacggcggaaagtcctaccctctctcccattaccgatctccaagcaacccccagtgagaggagcagagaaagcagcgctcgctgacacagaaaccagcccctcctcccgggtctcccagcacccacggcggggggctggggtcacctgctgctagacggccactgcctggtcccgggaagccccgagaggagcccctgccaccgaggcctccggctgctcctaaggctgagagccccactccagggcaagccctggaggcctggaaagttcctgcccagacagccagctccccagacagcccaccctcagagggcagagcgcccagcgcctggggcagagaccccccacggcgcctgcttcagcctgcgcgtctctctgtggagccagcgctccctcctgactggcccttcctcccagccttgccccgcgcctcctccccgcccctggcttttatgtgttgagacgatgccctcagagccttcatcgctgtggagcaaaggaagccgcctcccacagggagccaggtcctggctgcagcccagagcggcccagggaacgccacttcccacagccacgccaccacggaacctccggggacgcccaaaaacacctactgcaaacgtggtgaaaacacctggccatgaaagaaggtggaaaagcggagccaggagggcgctgggacccagccctcacatcctcaggccacccagcactcagccacgccatccacataggcccacgccggcactgccctccccggatcagaaccacaagcagggcttcacaaggatcacagcaggactcactcaagcttctacatggacagacgcctccttcttcttaggagaacgacggccaccaaggacctgaccatgccccatgaggaggaaggaggactccccagcctgacacccacagccacggtgccccaaatccactcaggaggcgacccaccccacccgcataccccacacgtcatacatgccacatacacacctgacacattcacatactccccataacacacgtcacaccatacgtgcgtgacacaccacacacttcccgcaagtgacacgacacacacgccatgcacacaccatacatgacacagcagacagcgtatgtacataccacacaacacacacacacgccccacacccgtgacaccacacaccacacccctacatgccacacatgccacacactgtacatgccacaccccacacatacacacgacacacaccccataccacacatgccactcacaccatacacgagacacatgccacacacaacacacgtacatacacatgacacaccacacaccgcacacgacacacaacacgccaccccagcccgctccatcacaggctcaggctggcacccaggcaaaggctctgtggccctgggccctgaaggtggcattgctgttctgtgaccaggcctcagcctgcacgtccctccctccacgcccccctcctccataaccaccaccagccctgcgcccaccctgttgccaagagccctcgtggggaactctgagcccccacagggtccggagggctcgactccagccaccgcatgggggtcccggccacacgactcctggagagccctggtcccagagctggcactgtcgtctggcctcccgaagtcagaggtgatggcgatgcgcacggcaggggccctgtgcggaggccctgcccagctagttacaagccagctccaggcccagccacgcggtcagaccagcctcgcgcccatcccttcccagcacttcctgcaggaaggtgctaattacccatggccacccagaagcacagggtgaccagcaacgagtcacctgcagccaccacgccccggcacaggttgtggagctcccaggtcccctccagctctgctgggtgctgccgtgtgacctgcgccttgggtctcggcccccagcaccgacacctctggctgggcacagacggccgcagcaaagtagcctcggtggagcggccccttggcgggcaggggcggggcacactcaccccgccggcccgcaggagcttgtaccggaactccgtggtggggttgttgaaggtgagcttctcgcagcgcaggtggttcacgggcgggttgccttccaggttcaggaacaggtcgtaggtgaagcagaccttcctcggctcctcctgaaacagagaaaacaagaaagtctgcatcagagggtggccgtggtgcagggacacagctccccattggccctggtcctcccctctccctcactgggcctctgttcccctccctccgatttgcgcccacttctctctcagggcacctcctgccctgcccttattcaaaatcgaccagcttactatgtgcagctaactgggtcttgcaggccccatggcagaaagaaagctcattcatagccatgctctcggactgttatgggaaacatgtacccccttcaaccctcacagcgccactgacagacagggaaaccgacgcacagacaccaactaacacgtggcagcactgagacctgccccaggcctctgaggcccacaatctcaccacctctattccccacttcctttgcagccagggccaagcccgacagacgcaggacacaggacacagactcaaacgacagcacagcacccagagggggcaaaagtacaaggtcacgacccagtttccaggaggctctgtccactttgggtgccgccccgcaccctcgccaccccagaagacagggacgctcgcctggcatggggcaggcgctgatggattttccgcacgaaggtgtgaggagttgacagggtggcctggaaaagggctgtgagtgaggggctgtgatgaatacagaaaggccaggagggctcagggcaggcaggcttgcaggaaggagctgtctgcacgggctcctgtggaggcctagccacatgtgcaggggctgtgtttctgtgaaccttgaaatttcgaagcaagacatttttttttttgagatggagtcttgctctgttgcccaggctggagtgcagtggcgcgatctcggctcactgcaagctccacctccctggttcatgcctggagcctcccaagcagctgggactacaggcgcccgccaccacgtctggctaattttttgtattttcagtaaagacggggtttcaccatgttaaccaggatggtctccatctcctgacctcgtgacccacccgcctcagcctcccaaagtgctgggattacaggtgtgagccaccgcgcccagctgaagcaagacaatttcatctgcttttccttaagaaccctgccccatcccaaatgatgtaagccacaggtcccaggggagtgtgggaaaaccgcactatgacaagcacgaatgtcacacggaagaagggaggttttcatggaaacaacgtgcatgggccgggcgcggtggctcacgcctgtaacccagaactctgggaggttgaggcagacagatcacttgaggtcaggagtttgagaccagcctgggctacgtggcgaaaccctgtctccactaaaaatacaaaaattagccgagcatggtggtaggagcctgtaatcccagctactcgggagactgaggcaggagaatcacttgaatccggtaggcggaggttgcagtgagctaagattgcaccactgcactccagcctgggcgacagagaaagactctgtctgaaaaacaaacaaacaaacaaacaagcaaacaaacatgcaggctcatgtcctaacattatgggcagctggtgcttgacaagggtgacgacaccactcaatggggactgaggagtctcttcaaccaatggtgctgggacaactggatacccacccgggggagaatggtggtggccctactccacccacacacagaaaacaactcaaaatggatcagagacctggacgtaagcactaacgccacatagctctcagaagaaaatacaggtatcaatcacgacactgcattaggcaattgtttcttataatacaacaccaaaagcacaggcaactaaggaaaattagatcacgtgaacttcggaaacatttcaaaattttggcccaggcatcgtggtttatgcctgcaatcccagcactttgggaggctgaggcaaatgcagagacatggatgagttggtaccttggcgggtgggaagtgcaggagtggctctaacagacacagggtttcttttgggggtgatgaaaatatgctggaatttaaaacttgtgatgattgcacaacactgtgaatgtactaaaaccaccacatctgtacactttaaaaggctgaattttatggtaggtgaatcacaacgcactttgttaaaatgcagtccaccgggataaaaataactaagaggatgggcgtcccgtgaaggcttctgagttggggaacactgctgagaagctcgagacatcacaccggctcagtcagcagtggggacgcaaggcagagctctgggcccggcgtcctctgcaccctctttattctcagccctttccccagcagcctaagctcgcaggtgtacggccacaccctcagtcctggtgagaggggacagaccaaggggctcgaggtgctgcagagtgccgtctctccccagcctgcctgcagtgccggacggctcacacgggtggcaccaggctccgcaagctccggggacaggcgcctcctgggagtcggggcccagctagtaacacagttggcagcggcagctcctgcggccgcccaggagtcccaagtgcacctgcatgggaaggagcctccagaaccacgagtccggtcagagcagacaagtgaacatgaacaggttcccgatccaaggccagcgggtgtggccgacagtgaccttgtgtggggaaagccctgatctcagaaaagtgggtctctgccccagccccaggcggggaggtgtgacctgtctgggccaggctagggctccctccccttgtccgaggggacatgtgacaggcttgggtaaggacatggaagggagggcggcctagggagggctttccttcccaagtcataaacaaaactgcagggacaaagtttctcaccacctctctttgtcctgccaaaacgcgagaggtggtgcctgtgggggcggcttccaccacaggactatgtggagggatgccaggccctggcgcctcttgccttcttgtcctgtaagaagaccagcccctacaggaagcccctgctacacagctggtccgagcaactgaatgtatccctaaccgacacgccccccgccaagtccacacttcccctacgcagctttccttgaggactcaaatgtggccacgtgcccctcctctgtggcccctgcctttaaggagacacttgtcccagtgggtccctgccaaactgggaacctggggctgtgaggactcctctcctgtcttcccccgaggtacgcagctggcctagttccaagtgagccaactgagtgagatgctagggcagactggaggggggatggtccagcagcaggggtgggaggggctgggaaggctccctggaggctgtggtggggctgaaggatggccaggagctggttggctcaagaagggtaagaggtggacgggtgcccaggctggaccgccaggagcacgcgtggcctcacacaggaaacagtggcatggactgcggtgtcctcgcgggacccccgggctccagcacagctgtggtggagacaggtggtgacgccgaccctggggagaagggccttggccgcccctgcggagggggagccctgtccggaggtggaggagggttttcagctcaggaacaacggtcacatccatgtctcaggaagccacaccctccggcctatggcgcaaaggcacttctgggcacagggctggctggaacctggcagataaaggggaacgaggtgggggaggagagctcttgtcctgcctttcctacagaagtgacaccactaggtgaacccggagaaggcaagcagctaacctgcacagactgtcctagctgacccaagaaggaccacgagagcatcctagcacctcaccatccacttggccgacagcagagacgtgggcagccacacagagagaccaagcctccagattcaggcccccaagacacggacacacgagtcagagggcgatcctgagtgccactgcatgtccacaagcagcaaaaaccagatggtaccaagctctgtgggacacatggtcctgactcttcaccaaatacatagcaaagcaaaaaaagagtgcttgaatgaaaagggggcgggagaatctagaaaggaatttaagagacaaaccaaagaatcacagcgtgtggatctcatcaatgtcctgattcaaacaaacaaacaaaaaaaaaaaacaagactttaaacactggcatattgagagactaagggattattaatcatcaattaatataaccaagtaacatggtaacataagagatgactaattcatgggtatggtcctggtagcactgtcttgttagaggccccttttgaaatatttacacatgaaatgaggatgtctgggatttgctccagaatgaccaggagggcagcgcaggctggaacgggcttggctgtgcagggaccacctttgggtgggtgacggctacgagggggtttgttgcatctgcctctgtaaatgcttccaactttccctggtaacttctgagtggacgctggcagcacggctgtgcagaggatgaacgtggctggggggcatcctcgtgcagaaagcctggggcctgagggacaccagcaggagcctggccacggtcctgcctcctaggcctcaggttcctcacgggcagcatggggggattcgctgcaatgccacagccacagtgctcagcaccctgcctatcacccacagaagccgtgagtgcccccacaaagcagcctgggctaagaagggcacctggggaggcgcagccagacggtaccaaagcactgggatgccccagggacgctccctagctctgcccactgcctggcacagggcaccctggggctcggaactgggtcctctcctctccacactcctggccacagctgtgcaccctggctgcacagcgagtccagccgcttctcccaagctcctcagccagcccctctctcctggaccacctgcctcctaaccgtcacccgcttccaccacagccccctttcaggcacggtatctccatgggctcagggctcaccctagcccaccaatggcctcgatgagcctggaggaggctccacatcctcggtgcagccagagggacatgctgccttcttccacgcctcctccacccagctcaccccttcctgacccccacccgcccttatcccggcctgctgctgtccccaggcacagagcacagctcactctctgccagctctccttacagtccaaagcatgtctgtcttctgtcccagcatcccactgacccatgaacaccacacacaatgggactgtcctgttttgttcctgatgggcctggtgctggactagcaccctgtctgctgaacatccctaaatactcatgtatccaccaaaaatgccacaggcgcctaccataagatcccagcagggatcacaagagagaagaggtctctaatcttacggatagtcagagcacaaaggcgaaacagccacgcagcagtgacaccagtgtgacaccaactgtaccgtgtcacagtgtctgcagagcgctgatggtgaccaggcactttctaagcactcagcggatacgaatgcttcacagccccaaacccaggggttcctggtgtccccccgtcacagatgaagatgctgaatcagacaggggatctgggcagcagcagagccagcgcaccccggcagaggttcttgggaagccccaggtcttggagaggttcctgttgcccacacaaaccaaacagggaaggcagccacgacgaggagacccggcatgttcacaactgcagagaggggcagcaccgaaaagcaaggaaggcaccccctgccggccaggtagaggtcacgccccgaagcaccctgcggccagcaccctgggattgagattggctgctggaagcggccagtgagtcacgggcactgggaatgactaaacggcatgccctctacacgagacctgggcctacaaagcttaggagcatcccagggggctgcggaccccttcctggctacccctggaaaccagcctcctgggagatgttgggatagcagctccttcatgcccctgaggcctggcagcaggctccgtgagcaatggcaaagtcaaaggtggctggccaaccagcccaggtgggacacccttagcgactccagccggactgtgctgtgacccactaatgtcagtagcctcctagagtcacgtgttcttgggccgggccaggtcgcgagcagctccccactcccaggctgctggccacgagccagcgtctctctggcctcgggaaactaagatgcagacgaactggccaaacaggtgcctgtgccaaaggctgcagcatgcaccatcccgtgcccggggtggggagtccaggcagcgagcccgccacgcctgctggtgctccttgggatgaggatcacaggcgccgagtggccaggctggccttggcacgaggcacagcaaggcaaaggccctgtggccggcgggccatgcgtggagcgcctgctgctgccaccacctctgagaggccacactccctctgccccacaccccacctggaggacacccagccttccctcccaatcctggatgtgaggggagagcaaccagccctcctgcaaggtcttcccgctcctgccgaccctggctgtctcctggccatctctgccccgccaagcttgtccagcggctgctcagcattcccctctgaggccccagggttcacagacacatgctgggcttaaaaaaacattttggccaggcgcggtggctcacgcctgtaatcccatcactttgggaggccgaggcaggtggatcacaaggtcaggagatcgagaccatcctggctaacacagtgaaaccccatctctactaaaaatacaaaaaaaaaaaaaaaaaattagctgggcgtggtggcggacgcctgtagtcccagctactcgggaggctgaggcaggagaatggcatgaacccaggaggcggagcttgcaatgatggagattgagccactccagcctgggcgactaagtgagactcttgtctcaaaaaaaaaaaaaaaaaaagatgcttaagagacgaagcaatcaagagaaatgcttgggcctggcacaatggctcatgcctgcaatcccggcactttgggaggctgaagtgggaggatcgctttgaggtcggaagtttgagtccagcctcatgcacacagtgagatctcatctctacaaaaaaaattttttttaattagctgagtgtagtagtgcacctgtagcaccagctactcaggaggctgaggcagaaggatcccttaagcccaggagttcgaggttgcaatgagctatgatcaggccactgcatgcaacctaggcaagagtgagaccctgacttaaagagggaaagacagagagaagctccaaccttacttgaatcctgacatgaacacgttaattttaaaagacgtatgtccacacacacagagcttccctcagtttttgcagggaactagctgcaggctctagagagctgactgtgtgtgtgagagatgataggggaaactgatggtattgggcatgtgataatgttaaagaattactaatttaccaatttctagccagaatgatattgtggttagggtttttgttttaagaatcttatcttacaggcacagcaggaaatattagcagattagtagacgtgatgtctaggacctgattcaaaacaacccttgcggggagagaggagaaagcaccccatgcaggctggcggctgtgggagccggaggtggggggcggctgctctgccattctctctgcttctgtgtatgctttttacgtcatctatattagaaaggagaattaaatagataagcttggcttggcccccagcctgcctcacagctctcaatttgaattcaacaccacctgtgtcccttccaccctgcccctgtcctggagctgggaagacagtggggaaccaggcaagtccccgccatggagcccagatggagccctccgccagggccttctccagccagcagcaaacaccttctccgccagggccttctccggccagcagcaaacgccttctccaccagggccttctccggccagcagccaaacgcctcctccgccagggccttctccggccagcagcaaacgccttgctctgcttcaggcggctaccttggaactaggcagcgagccctgtggggctgggtgtggggccacaggccttaccccgccacgccttagtcagtccacaccaacactccaggagggcatcactctctcaccagctgctaggagaggaagctcaggtttcgtggcatctggccatttaccgaagcctcacagaaccagtaagtgccaaacccactagtccacacatgaaaagcctctcgcgtccacagagccctgcccctcctctggacacagctgtaaggcactaggctctcgcgttcaccggtccacggcatactggaatggggctgacacacagtccggcaagaaagcaagggaagacagaaatgtggaaaaaagacgcccaagaggcaaacaacctcatccctgaaatcccacgtccaggatgcgatccgaccgaaatacccacagagtataaaccaacgtacgaggggtcaccgaggcacccctgcagagggagacccggagatgccaaatgtcccccctagtcagataaatgacagctgacacaaatgccagggaacacgacatggaccctggccagaaccaggcacagcggcctgtgctgacgccggagggccacgggcagggagttcagaggtgtgagtcacactcacgcccacacatgcacacacgcatgcgtacacacacccacacttacccacatgcacacctgtgtactcacacatgcacatgcacacacccacccacacacccatgtacacacactcatacacgtccatactcatccctcacctacctgtgtacaaacacacacacaaacacacccgtgtacacacacacccccacactcatacactcagacttacacacacacctatgtacatatacacacccactcacatccacacacctgtacacatacacactcacatgcacactcagactcacgcacacagagaactgttttggcaggacaaacattgcttatcatggagaggatttcaattccttgtaatctgcatatatcaccttggctttgtcatcaaaagaaaaacttttttttttttaaggcttaggtaaaacagcaccatgtgggctgaaaacctctgaccaggagtcagaggactcctggatgctgaagcggctcagcactggctcactgtgtgaccctggacgggctgctgcacctctctgagcctcagagagaggcaggaatcaaacaggaaagaggcagaaaggccaccggtgcctctggctgggaggacagtgtgggcagcattagcccaggccccttcacgcctgcctgaccgctcagcctgggaggccagggagaccccagaggccccgccccctcccacacatgtgctcagggcctgcagccccatgtgaaacagcgaaagccagccacctacaggcctgcctggaagaggctggccctggtcaggggaggcgggggagttttcttcttgtacccctgaacttcaaactccactgtggagcacgctgccgccactggaaggagctcgacagacacagcaggtgacgcagagggcgggctccaagcggagctggcacccggcgcaggtgacgttgcccatctgtgctcagcgtcctcacctgtgaagtgggaaaggcagaacccaccccatatacaggcactcaagtgctactcctcatcacacgctggcccagagacccccgggatacaccgttgggagaagaaagcaaaccacgagactgagagcaccacggaaccctacagctctcagattcaaaagcgctgtgggggtgatgtcagacgcacagggagagactggaccccacactcagctacgaacctcccgagacagcaggagaattcaggggcagagggaaggaaaagggaggagctccagttcctaccctgcgtccttctgtgcttcgcatttccgataaccagaatcaattcctgcatcgatgagcaattagaaaccaaaaggaggaggcagaaatgcagacaccacattttaaaatgctctccatggaaacagacgtttttagacttaaagtttggcttctattaactggaagccaaacttaatgatttctcctcagtctgacaccagaaaaggcagaaagcagccagcaacgtaaacacctgtaaaatggcagtttgaaatctggaccataacaaatgaagacaggaggaggtatccccaagatgagcccatgaaagtcaccggcccaatgctgccaggctgagagcagctgagctgagacctgcgagtggtcagtcccggggcctcctgcctccctcatgcccagtatgaggacagcctctctctaccctgaactgaggccgccggaacccacagctcctagacccccgccccatcccgagagcccgtgtcccccaagccactgccaggcagagtccagctggaggcagggtccattcagggctccagggcgccaggcccctagcacccccgctggacagcaccttccctgctctgggagccacagggcagatgccttcgtcctgtacaggaggcacaaacagtcggaaagatggcctcagagaagccaggaaagaattttatcaggtacatgccgagataggaaattggggaacataatgggcgctttcaatgcccagccaattcttccagccccttctctagggacccaggagaaggcattctgggcctctgggccgtcccaccgtcccagccttggaggtcctggggtggccgtggcgggcgcagggttgcgcagcacctcctctctccctgcagcgatgggcaccttcgttctttccttgtgcttctctgcccggctccagacccgccctctaggaaacacagatgcatctggggacccacttcagggaacagaaggatgctctggggaaagacagactgcgccacagctggcacgcatccatgcggcttgtcacaacgcggcagctcggccctgccctgggtccccgcacacaatgtggcttctgttctggctccctcggcaatccaccagccaaggcctccccctcggccacatcaaccggccgattgtccctggcggagcgctctatgggctcaccagaggggctgcccgcctcctgaactctgcaaggccctgggagcctgggagccagggagggagttgcttgcagaagcgttgctccgcttctgcgccagcaggtcaggggcaaggggagaagacaatgggggctcagagggggctccctgcctcccagcctccctgcctcaagacctgctctccccagtctcaaactgagcgcacgcaggggcagcccaagtggaacccatatagggcagcatttgcagctaagagccatctccactctacagagggtggcggctatggagggcaccccggcttggtgtccttggaacctcccctgtcatgtgcgactgcctagggccccccaacacaagccacccaggatgtgtcaggaagatgcctctgagggtcttaaggctatgaggccagtgcggtttaacttacttttaaaactctccacgtaatgcccttcctgtgccctcggacatctgcgtgtgggaggccacggtggactggtgatggctgtggctccctgtccaatgacagcttgttgcaggggttggggaggaggtctaatattagtggcaaataaccaaaataaacttctttttcacacttggccatttctaacactggactgtctctcacaatcagtgtgtacccctcatgtgctttctctcctgctctcaggacgggttccttcaattgaagtcacgggagacttagactgaaggaagaggaatctggcgtcaggggcagggcaagttttaccgccccaaacagccacactcccctttcctggtgctgttggtaccgggttcaatagaaacaagtgccccggccagcatcccctcatgtgactgcatctacagggcacctggggggctgcgagccgacaccggccacaggagaggaaagcaggccactgtcatctcagatgacccctctccccatctgacagcagctctctctgcccctctcggttttgccaagcacaccaagccagaaacgcaggactacttggcagccagcactggcatgaaagcgacaaaggtgagagctaaaaggattgccaaggaaattaagtcacatcaaatgatgcctcagagaagagctcctgagtccagctgctgatcttggctaatgcctcaaaacaaagcaagacaaaaatcaaccatgctaaagtctgctgggaacgtaaagcgggaacgtggcggggtcaccaagcggtaaagctgaaagagaccccgagagccagtcccagcccgagcagggccatgcatgtcagtgggggcccccaccccgggaaggctcggggaggccggcagcccccggcccctgccctgcccaggaccagggcatcaaagcctcccaggtcagctctgcagcccctcccgaggccctcaccctgcctcctaactgactccagggcacagacaagcacttcctgtttggcagccactgaattccttctgggagagatggagccaggtctgcattataatgtcactgacctactccagaacatcatgggacaggcgtgggacaggcacctggctggggcttctgaagccacggccacagagcttacgcccaaagaggcaggtgaacccagaggactcgaccccttatgcaggatctaacagcaaatgccaccatgtcacccccagcggatgagcagctctgcccacccagctcacctccctcacactcgccccagccccgcttcatcacctggactctgcctttcaaacagctgcccctccccctagaaggg[136 bp omitted]cacggtgaaaccccctctctactaaaaatacaaaaaaattagccaggcatggtggcgggcgcctgtagtcccagccactcgggaggctgaggtaggagaaaggtgtgaacccaggaggcagggcttgcagtgagccgagatcacgccactgcactccagcctgggtgacagagcaagactccacctcaaaaaaaaaaaaaaaaaaaaaagaagtcaatctcgcttcttaagagaacccaaccgaccctttctaactgggtccccgtgacacactcatagcacccagcccctgggcttcctggaactcattctgatgggtcacttcctctcccgtgtgtctgccgtctcttgccctgtcagtctgtgaactccacaagagaggggaacgtgttcacttggtcttcactgggcctagacttggtaaatatctgacacatgaagaaatccatgaaactccagcaaagaatggaagaaaagcaattcctcctcctcactgtaaacgaacattaaaaaaaaaaaaaccctcatttgcgaagaataaatgacaagggcctcccttactagatacccactaccctttgacagtctcccccgcctctctcaacagtgggcttggtgcatgccgccagcggacagcgaaaacagaggcatgggcctcaagtgtggcaaagggtttcagacacaaaaccagaagcactcgccagaaaaacaacagtaagacgtccatcaaaataaaaaacgtttgctagacaaaaatatactattaagagaatgagaagataagccacagacttggagaaaatatttgcaactcatataccaagtacaggacttgtatccagagtatatacagaactcttaaaactcaacaacaagaaaacagctaacccaattttttttaatgagagggaagggcaaaattctgaacagatactttaccaaagagaatatatgggttgcaaataagcacatgaaaacgatgctcattaccgtcggccgtcagggagatgcaaatcaaaacctaaccaggtaccacttcacacccactaggacagacggctataatcaaaaaggcagaaaatgagttgctggtgaggatgtagaaaaatcagaaccctcatacccggctgggggggaatgtaaaatggcacagctgctgaaaaacagtctggcagttactcaaaaagttaaataaagaacggggccaggtgtgttggctcacgcctataatctcaacactctgggaggctgaggcaggaggatcacttgaggctgggggtttgagctcagccttagcaacatagtgagactctctaacaaaaaaaaatttttttaaatcttttctttttttcctttctttctttctttctttctttcttccatctttcctttctttctttctttttttttttttttaaagagatggggtttca[131 bp omitted]gatgtgagggccggg[176 bp omitted]gaggcaggagaatggcatgaacacgggaggcagagtttgcagtgagccaagattgtgccactgcactccagcctcggcgacagagcgagactccgtctcaaaaaataaacaaataaaatttttttttaaaaagaaaaactcactgggtgtggtggcatgcacctgtagtcccagctacttgggaggctaaggcaggaggactgcttaagtccaggagacagagctgtgtgagctgtgactgcaccactgcaccccatccagcctaagcgacacagtaaggccctgtctcaaaacagacaaacaaaaaacccaaaaagttggccggtcacagtggctcatgcctgtaatcccagctacttgagaggctgaggcaggagaatcgcttgaactcaggaggtggaggttgtagtgggctgatatcgcacctttgcactccagcctgggcaataagagcaaaactccacctcaaaaagaaaataaaaagaaaacaaagagaaaaaaaaaaaaaggaaaacaacctgaccatattcaagggctggcgaagatttggagcaacgggaactcttcctgctgatgaggctgcaaaatggcacagcccctttagaagaaaaccactgggcagtttcttaaaaagttaaatagacccatatcatgtgacctagcaatctccactcatttacccaaatgaactgaaaacgtggtcacacaaaaaacccgtatgcaaatgtttagggcagccttattcataatcacaagagctggaaacaacacagacgtccttcaacaggtgaacgaataaacaaaccgtaaggcacccatgcagcggaacactcctcgaaaaaacacaacaaaacacgaagattcattcatatggcaacatggacaaatctaagtgcgctttgctaagtgaaagaaaccagatacaaaagggctacatattgtctgagtcttatgacaatctggaaaaggtaaactacaagaatggcaaacagatgagcggttgtaagggctgggggtggggagggggactgacttcaaagggacagcaagtgggaatcggagtgggggaggcagagtcccggtagatacacgactctctgcatgttgaacccagagtaaacgtcacggaatacaaattaagaaatcagtaactaataaccggatgggcagagggggcagacccaagatgaaatgcaactgagactgacgaagctaactgtattacaaatgcatgacatgaccaccccagggaaagggctgccacaaataaccttgtacccttgcagcgttcctacttgacagaaagagctgcacgccaatgctgagccctagctgccaacacaggagggctggctgttgatgctgaaactactttccgggtatcctggaattaaacgggtaaacaaacacagtacagatatcgggagccaggtttcccccttcagagacagctacaaggcagcaactggggaaggcgtgaatgagcccgctggtgctggatggagttggcagcctcagaggaacgtacgtttgttttcatattacacagatagatacagaactaaacacagatgtaaagggtgggggtggtttcctagctctgtcatatgagagaacctaaacgcagtgacaactaagcagcagtgagcacacttagctcccagatcttggcttttaaataccattttccagcaacaggaactaaggctcctgggagcagcggaagattctagggctggggcagggaaatacacggtgagcctgtggtgccagaatgtgaaagcacccccaaaaccatgggaacatgaaatgacaggcccgaatgcgagaacaatttcaataacaaacaggtaacaacagactggattatgaccccaaagaaaaaccaaatacctatgaatccatccgtgttgatacaaataactgaatacataaatggaagagaagggacggctcttccttactgaaaaattccagttaataaatgtagaaaggaaggaggaaattaaaactaccagtaggccaccactgggggaggctaaaattagtgggtggtactatgggttaagtagccctcatccaaaatgcttgggatcagaaatgttttggatttcagatctttttttggattttcaaatgtctgcattattcttactggttcagcatccctaatctgaaaatctgcaatttaaaatgctccagtgagcagttcctttgagtgtcctgttggtgctcagagtttcagattttggagcattttggtgttttgtttgtttgtttgtttgtttgttttttgtgagacagagtctcactctgtgacccaggctggagtgcagtggtgtgatctcagctcactgcaacctcttcctcctgggcttaagcaattcttgtgcctcagcctcccaggtagctggaactacaggcgtgcgccaccacgccctgctaatttttgtatttttagcagagacggggtgccatgttggccaggctggtcttgaactcctgacctcaggtgattcactcgccttcgcctcccaaagtgctgggattacaagaatgagccactgtgcccagcctgagattttggagcattttttattttggatttctggattagggatactccatctgtatttttaaaaacagacaaaacaaaacaggttatctgcacagcttcaaagtatctctcccaaaatgggtattagtaactgtagtgtttttaacctacgcccaccaggatggaggggttaattcctctcccttgagtgtgggctggacttagtgacctgcttcttctaagcaacaaccagtggagaaacctggcagatgccacttaaccaggagatcaaggtcaacctcggctgttaaccatggatcatgttaatatctggcacttcctaatatgatggaagaggaagtgcatttacctctgtggtcttcttatggaactctatagccacggactagccatgagaaaacggcaagtagagggagagtctacataataccccactagcacatttcaaagatatcaaggtcatgaaagactgaggaaagagacacaggcaacagtgcagcatcctggggtgggttccacaacagaaaaagaacatgaattgaaaactgggaaacccaaggcaagtccctagtttagttcacggcgattgtactgatgctactgtcttggttttgatcactggaccatggttatgtgagatgttaacattaagggaggttgggttgtgggggaggtcctatgggaattctctgtactatctttgcagctcttctgtgtctaaaattatttccaaattaaaaaaatcgtaactatgagagattcccagtcaggaaccatactcggttcagtaacgaagatttttatgcgtctggagcagcttgggtgtgtgaatctacttctttgttcaactgtgaattttatggactctaaatacagatcaagcctttctgatgacgtttccatatccaaattgagacgtgcagcaagtataataaacagactgaatttcaaagacttggtatgaaaaaagaatgtaaaatctctcaatacttaaaaaatattgattacatgttgaaataatgttttagatacactgagttaacccaattactaaaattaatttcacctgtttcttttgaacttttttaacgcggctaaaaaataataataataataattaagatttctactggacagcccggggtctgagatgttactcactcactagaacaggaagggctttaaatatctctgaccacttccaggacaacaaacagatacaaagagagcatttaaacaagactccctcatctgactgggccaagtgcactgaggaaccgatttattcatccgggccactgccttgtcccggggcagccccagcatgtcctcccagcccacagtcaaggccactttccaaaagaacagttcagccgcagcatgcagaagcctcgaggccgcatgtgatgggagggaggccacccggatccccccttgaagagctggagcccccagctcagggaagttcccatcacacatccagtctgcccagcaagcgctttactgtcaatgcttaaaaataggcacttatccagaagatataaaggacccggtcaagcaaagtggctcgcgcctgtaatcccagcactttgggaagtctaggtgggcggatcgcttgagctcagaagttcaagaccagcctgggcaacatggcaagacctcatctctacaaaaatacaaaaattagccaggtatggtggtgcacacctgtggtcccagtcactcagaaggctgaggtgggaggattgcttgaggggagaggtggagtctgcaatgagctgttattacaccactgttctccagcctgggtgacagagtgagaccctgtttcaaaaaaaaacaaaaacaaagacaaaaaactcttacaactcaaaaagaaaaacaacccaaatcaaatacgggcaaagagcttgaatagacgtatcttcaaaacaggatatacaaatggccaataagcacatgaaaagatgctcaacttcattaatcatcagggaaaggtgaatcaaaaccacctacaaataccatttcacacccacagggatggctatcagtaaaaacagacaaaaaacaggagataacaaatgttgctgaggatgtagagaaattggaatgcttgtgtgttgctagtggcaatataaaatggtttggctgctgtgaaaacagtttggcactccctcaaagaaattaaacatagaattaccatatgacccagcaattccactctaaggtatacagtcatccctcagaactgtgagggattggttccaggacaccctctggataccaaagtctgcagaggctcaaatctctttatataaaatagcagcatttgcagataacctatgcacaccctcccatatacttgaaatcatctctagatcactcatcatgccgaatacaatgcctacacatcactgcattcacgtggattcaacggcccctggcagattcacgttttgccttttagaactctgtggattttttttccaaatgctttctgtttgtggttggttgaattcatggatacggagcccatggatatggagggccaactgtatacccaaaggaattgaaacctggtactcaaacacatacacgcacagccatgttcaaagccgtacttattcacaatagccaagaggtgggaacagcctgcatggccgtcaatggatgaatggataaagtgtgggacagccatacagcagaatgttacttggccgtgaaaaggaatgcagttcttatacatgcaacaacacggatgaactcacaaatacggcagaaagaaggaaagaagcgagacacaaacgtcacgtactatatgactccatttatatgaaactgccagaataggcccatccaccaagacacaatatagatgagtagctgccaggaacagtggcgatggggggaacgggaaacagctgcttactggcacaaggtttccttccggggtgatgaaactgctctggaactagaaggagacggcagtagtacaaccctgtgaatgtactaaatgccactttacttactgtttgctttaaaatcgttaatttcatctcgtgaatttcacctccattcttaaaaaggttggggggatgggggtgcggcggcacttattcactggttgtgccaggaggttttctgatatttggacatacaacggctagccccctctggaatgaatctggttcatccatttagtattcatttaataaatatttagcaagtgctacctccatgctagacgccagacgagaacaaaagcagagccctggtcctgagcttactttcgggtggtagagacacacagacaagtaaacacacatccacatatgtgctacaaaaaagaaaggaacagtgagttagaaaaaagaataaagaagaaccaaactcagatgacaggctttggttaattttagatgtcaacttgactgaattaagaaatacctagaggacctggcacagtggctcatgcctataatcccagcactttgggaggccaaggcgggaggatcgcttgagcccaggagttcgagaccagcctgagcaacatgacaaaaccccatctctacctcccaccaaaaaaaaaaaaagaaagaaagaatgaacgaatgaatagctgggcatggtgacatgcacctgtggtcccagccactcggaaagctgaagtgggaggatcacctgagcccaaggaggtcaaggctgcagtgagctgagattgtaccactgcactccagtctaggtgacagagcgagactccaccacaaagaaaaaagaaaaaaagaacctagagacccggtaaggcattatttctgggtgtgtctatgagggtgtttccagaggacactggcatgtaagtcgggccgaggagggaagactcgccctcagtgtggaccagcaccatccaactggttgggttgcagatgggacaaaaaacagagaaatggccatctgtctctaaagggacaaaaagtcagggagggcaatctctccatctgcctctctccctctgtggccttaggactctggcctcacaccctcagtaccaggctttcgacctcagactgacaattacagcagggtttctctgctgcggaggcgtctgagcttgaggggagctgtgctgccggcaacccagatctccagcttgcaggtggcctgtcacgggacttctcggcctccacaatcacgtgagcctattcccccaataagttccctctcgtatctgggtatctatctatctgtctctcctattgattttgtctggagaaaaaaccccaacaaatacaacaaccaatgggtcaaagaagaaatcactgggagaattagaagatacttttgagataatgaaaacaaaacacaatatatcgaaacatatggaatacagtgtacacagtgctcagagcgaaatgtacagctgtaaacacctacattcaaaaataagagtgacatcaaatcaatgactccttctacaccctaaggaattagaaaaagaactaaactcaaagctaacagaaggaaaagaacagaaataaaatacgcaataaaaggcatagagtgaatcaataaaatcaagttttttctttgaagagatcaactaaattgacaaacctttggctagtatttaaaaaaaagaacataaataacccacatcagaaataaaagtgggaactaccaatcttatagaaattaaaagaattatgagaatactatagacaactatatgccagctagataatgtaaataagacataaccttagaagcaaattactaaaattgaatcaagaagtagggctgggcatggtggctcacgactgtaatcccagcactttgggagaccgaagtgggcggatcatgaagtcaggagatcgagaccatcctggctaacatggtgaaaccctgtctctactaaaaatacaaaaaaaaattagccaggtatggtg[174 bp omitted]ctcaacacattgatatcaagagacggaatcagaaatcaaatacttcccacaaagaaaagtccaagaccagagagttcactgaactccatggaacattcaaagaacaaacaccactcctgctcaaactctaccaaaacttagaagaggagggaatacctcctaactcactttatgagggcggcattaccctgatactaaagccagacaaagataccacaagaaaaccacacagcaatgttccttatgaatacagacacaaaaatccttaacaaaatactagcaaacccaatccaacagcacactaaaaagattatataccataaccaagagggatttatcccaggaatgcaaggcggcagggggttcctacataaaaatccatcagcgtaatacagcacattaataaaaggaagaaaaaatctacatgattttctcattagagacagataagagcatgtgacaaaactcaacacctattcatgatttagaaaaacgtcattcagcaaactagaaaaagaaggtgtgacacggtaagaaatatatatatttggtctctgctcctagtcctggcaccgagctgctaaaacactttctgagagatggtggtgatagaagcctgttttgttttaatattgggtcttagtcctgggttcctgacacaaaggcctctaagatccttgaaatcttggaagtgatacgagcatcttttcgttcgttcatgaggtgtctgctgactgaatgcccctagatagcttcaggatgggggctggttgccaggggaaccaatcatgtgataggtggctggaattttcagccccaccccctgacctcttagggagggcaaaggggctggaaatttagtttaatcaccaatggccaatggtttaatcaatcatgcccacacaatggagtctccataaacaccttacacaaaggggttccgagagcttccaggctggcccgtctgagggcatggaacgtcagcacccttcccacatagcctgccccatgcagcaaggtttggccattactgaatcgcactctttacaacaaaccagtaatggaagtaaaatgttttcctgagttctgtgagccgttatagagaactgttgaacataaggaggggcaacacccgatttatggccggttgagtacaggtggcagtctgggactcgcgactggcatctgaagtgggggctgtcctgtgaaactgggctcttaacctgggagcttgcgctaactccaggtcgtggatgacatcactgaattcaactgcaggacccccaagtggtgtctgtggagaactggagaactgtaatgtctgggaaacccacacagttggtgtcagaaatgttgtgagtggagaacaggtttttccttcttctataagggaatttccttaacctgataaagggcatttacagaaagttcacagctgacatcacactcaatggaaaaaggctggaaactcttcccctgagatcaggaaccacgcgggatgcccaccctctccactgctattcaacactgtgctgcatgttctagccagggcagtaaagcaaggaaaagactttgacgaaagacatccaaactggaacctctatttgcagatgacatgattccatatacagaaaatcccaaagaagccacacacaaaaaaaaaaatcaacaaaagaaaaaaaaaaaacaacaccctactaaagctaataataaattcattaaagctgcagggtacaagatcaatacacaaaaattgtttgtgctgtccagagaggaggtctacaggaaaaacaaaaacaaaatcagctgtgcttctatacacctgcaatgaagaatccaaaaagggaattaggaaagaattccatttacaatag[132 bp omitted]caaaacctcatctctactaaaaatacaaaaattagctgggcgtggtggcacacgtccgtaattccagctactcgggaggctgaggcaggagaatcgcttgaatccaggaggcagaggttgcagtgagccaagatcgtgccactgcactccagcctaggtgatggacagactctgtctcaaaacaaaacaaggcaaaaaaacctaggaataaatttaagcacacaggtaaaagacttatgtatactgaaaactataaaatattgctgaaagaacctaaagacttaattaagtggaaagacattccttgttcatggactgaaaacttaatattgttaagatgtttcaaaaatgactagatacaatagaatccctatcaaaattccaatataattttttgcaaaaatggaaaagtcaaacctcaagttcatatggaatcacaaggggcacagaataaccaaactcatatggaagagggaaaaacaaaacacagagttagaggactcacacttgccaatttcaaaacttcctacaaggctgggcgcgctgactcacacctgtaattccagcattttcggggcccaaggcgaaaggatcg[132 bp omitted]accccatctctactaaaaatgcaaaaaattagccagacacggtggcaggcacctgtaatcccagctattcaggaggctgaggcaggagaatcgcttgaacctgggaggcagaggttgcgatgagccaggatcgtgccactgcactccagcctggacaagagcgaaactctgtctcaaaaagataaataaataaataaataaataaataaataaataaaaagaccagcctgggcaacacaatgggaccccatctctacaaaaataataaaattagctggatgtggtggtgcaggcccgtggttccagctacctgggaggctgaggtgggaggactgcctgagcccaagaggtcaaagctacagtgagccatgattgcaccactgcactccagcctgggtgatagagcaagactctgacaaaaaaagaaaaaaaaggcggggcacggtg[202 bp omitted]gcttgcagtgagccgagatggcgccactgcactctagcctgggcgacagagccagactccgtctcaaaataaaataaaataaaataaaaataaccttcctatacaactacagtcatcaaaacagtatggccagcataagcacagacacgtagaccaatgaaatagaattcagagtccagttttaaaccccaaatctatggccagctgattttcaacaacgctctaacaccactcgatggcgaaagaacagtctcttcagtgaacggtgctgggacacctggaaaaccacatgcaaaagaatactgttagacccccacttcacttcatatatgaaagttcactcgaaaatggatcaactctctacgtataaggactacaactatgaaactggtgtaaataaacatggggcaaatcttcatgacctcatttggcaatggagtcacagatttgacaccaaaggtgtgagcgacaagagaaaacagataaatagaatttcataaacatttaaaacattcatgcaacaagggacattatcagggctgggtgcggcagctcacgcctgtgatcccagctagttgggaggctggggtgggaggactgcttgagcctaggaagtcagggttacagtgaaccaagatcacactactgcactccagcctgggcaacagagtgagaccctgctcaaaaagcagacattatgaagaatgtaaaaaaaaaaaaaaacacctaaaaaaggggaaaagatatttgaaatcacatacccaaaatatttaaaaaacttctataacac[138 bp omitted]atggcgcaaccccatcagtactaaaaatacaaaaattagctgggcgtggcagcgggagtctataattccagctactcgggaggctgagggaggaaaatcacttgaacccaggaggcagaggttgtagtgagccgagatggcgccactgcactccagcctggccaaaagagtgagactccatctcggaaaaaaacaaacaaaaatgggcaatggatatatctagacatttctcgagaaagagatacgtgcagccagcaagcatgtgaaaagacgtgaaacatcacgggtcatcaaggaaatgcaaataaaaacctcaacagttaccgctctataccctagaggatggctataatttttaagaaacagaaaacaagcattgctgaggatctggagaaacaggaaccctcacacattgctggtggacctatgacaggatacagccactggaaaacggcttagcagttcctcagaaagctaaacagaaaattattgtatgagcctgcaattccattcctaggtgtatacacccagaggaactgaaaacgggcactcaaacaagtacaaacacacactcacacacgttcacagcagcactattccccatagcaaatgggtagaaacagcccaaacgtctatccacagatgaatggataaacagaaaatggtatagctgtccgtcattctgtgtagattccatacttttgaatttacctcctcactgaagttcatttgcaaccccaaactgatactgtcagctttcacagtcatttgcagacatgcccagaacagcagaaaggttgagctgcccaacacgcatgttcccagcagatgtcaagcaaggcaacgctgtcgtcttgcttcggaaaaacttcttcacaacacacatgtattactttgcaatcagatgaggccttccaaattctttttccttgagagaaaggagtgatttttctgtaaaaggacatcctaccaacaggtcaaacaaaatgcggcctcagttacgttctaatgcctaacactgcataaagcacaattccttcattatacaggcgatgccatattcaaggtcaagtgcactcgctgaaaaaccctcatgcttatacaagaatagagctgtcggagaaagcaccttttctgctccggtcttagagccacactcgccggcgaagccaaacaacatctttttcatcgcaggaccctcaacctcctttgggccctctgaggtctgaggctccctttctccactgaacttccttgcccagactgactggaaggagccgataccatctcaacaatgaaaggatgaaatgcctactatgtgccacgcgccgggccaagtgctacacctgctgtctccctcttaatcttcctgatgcctgagaagcagacgcagccagaaaccccatcttatggatagacaaactgaggcccagaggagtgtcccactcacggtgacacagccaggctctgagattgaacgctggcgtgtccacctccaaactgcggtctccgcagctctctccctacccagtctggacacaccagcgcctccccaaacccaccccgtcaccaacctctgtttactccttattccacttacctgacctcccaccgaggagtaagccatggctaaccaccaaacgcgagccctggctacaccaggtagaaaaaccaccagcaaacccatgcactatgaccctgtccctaatcgtgttccaaatcctgcagccatgacacactcctatccctggcaccaaaactcatcaagcactgtcattctaggtcatgcctgtctcaggtatttggacaactggtgtgtgtttacaaagagctggttccaatcctagctctgccaacttctgaggcttgaccaagtgactcgggatccaggatctcctccacctgtggacagcacacacaccactgccgctgtgaggaggacctgcatccctggaccttgccgtggggccactggtactcccggtgtaggaccctctacaaccaccccaggaagagagggttcccaggcaatcgggcacatggtacactgaagcggctggcctctgtcctgagagagagggagcgctgcgattctcagcacaggctcatggcagaactccgggcccagctacgcggcttctgcaggaattattcagacaaataaacaccaagaaacatgacttaaaaaaaaaaaaaaaaaaaaacagaaaaactggccatcctccaaaagggctcaatgaaagcacatgctgagatttgaaaaacctgctacatctaaaatgggagaattttactatatgtaaattatacctcgacaaactagacttaaagaaaacatcttaacccaactatgttaccatgggttgctggaagtgcacatgctcctgctgaagggcaccgagggagctggcaccacgcttggggccttccagaggaaccaggcaacaggagctctagaggaacatggggtcccatgccccccatgcaactacatgcccccacaccctaaatgaagcccccaggatcccaaaagagcaggcagggattcagagagggctctctgccctctcgacacccccacacaggggaggatgctgggcccagtagtgacaatcctatggtcaaagggcccccggctccctttatctacagggccaggatgcaagggtggagcttcaggaagtcaggacagaaacagccctggagtctgcatttcagactcagttgagtgctgcaggacacagcaggtaggggcacctgagtggcagccacttagggcccctgctgcactgggtacagtggcaccacacagtatgggtttctgccacacttgggagcggctggcctgcatctcgcctgaagttgcccctactaagcaaggatgacaagcagcaaacagcactggccaggccctgccccacctgcctccgaatccacgggcagcccacggcggagccaggcagcagccggagccccttgcctgagggcactaggaagtagaatggatgccaccagtccccaggtggctgaaggccgtgtcagggaccagacaggtgtctgggaacacagaaaacctcactgagcttgggcacagtggcaagtgcctgtagtcccagctacttgggaggctgaggtgggaggatcgcttgagcctggtaggttgaggatacagtgagctatgattgcaccactgcgctccagcctgggcaaaagagcaagaccttgtctctaaaaacaaaacaaaaaatgccttgctggcccaaactgcttctgaacctcagaggaccttaatctaagtcaccccagaggcgagtttaaactgcccatacagatggtggtcccacagcccacccgctagaataccagtgcctgggctgtggagcacctttgcagatgggctcgagcaatcccctcaaccgccccaagagggggctgctgttctcattccccttccatacgctcaccggatacagctggggagactgggagcccgggcacacacctggcagaggggtggccccataggcccaaaggcagggaccactcacccctcaggaggcccacttgcaggcaggttcggctcttctcccagcggggcctcaattccaacaaagcctcagaatgacctaggtttctgtgaactggaccccgcgcgaggccttgcatctgaaatcggccaagctgcaccggctgaaacgtcacccggctcctaggacggccgcacgccaaatgcctctcctcaaggcccttcgtgccagagggtttgtggaaaagtggaatggcagccacgcagcccggcaccgccaggtacaaaccggggactcagtaaccaagcggggcggcatccacaggcctcccagggacacctccttccccagcgttgcctccatgccgggccagctgcacttgtgggaaagcagccggccatggacaagccacaagccaggaaatgtcaccgctggccctgtggtgacacctgggaggaggagcaggggcaggctctgagttgttttaatcattaggccaaaaaaaaaaaaaaaaagtgaaaaactacagatgaaagaaaagaaaagaaaaccccctggactcccaccacccagatgacccgcgccaacattctggatagagataactcctttttccttcaagtattatatatgtagcttgcttcgttaattctgaaggtcatcaaagattctgcccagaagacgcatcgtaatcggactgtaatcagatatttatgctatttcctgatctcagtcactacacacggcccggttattaaccctctaggaccgtcgaggaagctggccctgacaggggatgtcactgctggcacattttctaggcaactggacaggaggtggcccagcagctcccctagagaagcagaccaagggacacgcccacctgctgtcatgaaaccagccgtgtcctggcccccgacgtccccaggaatggagatggtgaccagcaccccccgcagcactcactggaatgtctgtgcatgggcagcggccagttctctggcctgttttgtgaactgccgtggcacccggagcaggggtccccacagagaggcatcctgcttgctcccctcagggatcctaccttgtttttgaagtgcacctcgatgggcatgatgaagccagcgtaccccgactcctctactttgtaggggggctccttgcacactaaaaagaaaaggaagaaacacacccatcagcctcctgcctgtttcaggcccagctgccagcggcagtaccgcacccctcaaccccaccacctcctcacaggggcttggctggcctctcgggggtggcttttcaggaggttaagcccccgacaggattgacttccacggcaaagttatcttaggaataaaacagcagggaagaagaggagaaaggagacttggccaccggcatggtcagcagagagtgagaaggaacgttagcctgtcatcgggatacttgctcctgcagaggatgaggaggctgaggccagagaaggctgcacaagtttgcccgactcaggtggatgtcggtaagcgtgacctgggtgaggtgtgaaacccagcagggagggccacacactctactgtcaccacctccagcacgggggctgagcacctgctgcaccacggacacatgcactgggagacaggggagccccaggtggctgggaccctcctcctgggttctagtttagcacctaataagagcattcccaagtgacgcaaacaaaaccccattgaccccagagattaaaaaagaaaaaaaaaaggccggacacggtggctcacacctgtaatcccagcactttgggaggccaaggcaggcggatcacttcaagtcaggagttcgagaccagcctggccaacatgatgaaactccgtctctaataaaaacacaaaaattagctgggcgtggtggcacacacctgtaatcccagctactcaggaagctgaagcaggagaatcgcttgaaccccagaggcagaggttgcagtaagcggagattgtgccactgcactccagcctgggtaacagagcgagactccatttaaaaaattaataaataaacaaagtgcagcatgaggccaggcacctgaatacttaatctgaacctggggaggaaagcggaggcagaacagaggaagggtggcctgtccccagcagaggaggcacgggcatgggcagtggcctgggatttgctctcagactccacccatgcctcgtcttctccccactcgcccatagtctgaatcccacccagccacaaaggcccacagcagggccacctccttcgagaaacagaccccatgtccctctgcctctgacctccaggtcacgtgcttcccaaatcgactgtcacatcttatctcatggtccccacgccttcaagaaggaatcctgtcctgtgacgggtactccaagcctgaagaacttctatccccccagacagcgccaagagggatggcagttggccgagtgcttcaattcaaccaggggagaacagggagacgcaccggcccactctcctgcctgagagcccacaggaagcaagaggacaggaataaggccgtgagagtgaaggcaggagggaggagattcaagccacctgccagtttctgaaaggcagaagtcggacgaggacacgatgggcaaggggcaggacaaggaggcgacggctcagagtctgccatgggggcgccgcagggcagggacagccactggtgccagaaggctgaaggtcctggactggctgagcggagggcaggagtgaggatgaaagctgggggagggaaagggagcacggtgggggaggagggtgggagcaggggagcgactgccactgcggggcctgagcttctccctggggtgacagcaatgttctggaattagacagcagtgatggaatcagtggtcatggccgcacaactatgtgaatatactgaaaacgctaactgtacacattacaagagtgaattttatgatgtgtaaattacatctccataaagcggttattaaaaaaaaacaaaagggcaaactgaaaggctgtgttgggcacaggagccctgggatccctccctcctgcccatcctccttcccgcccattccccctccacccctccccaccccaggaagtttcaggtttccctctggagaaattgagatggttctgtgtctcaaggagccaactatcagggggaagctgaaacttgcagcgtggaaaccagaccccgaggaaggccttactcattaggaaatcaggaggcccgtgagccttcaggcctgtggataggcagaacccaccctcccatcacataacgctcaggagctcccaccaggaggaaagagcccgagcaaacaaataatttggagaccacagagagtttgacaaaaagaaagaaaaaaaataaaaaccaagagtcaatgtcctcagattcaaggagatatatatccaacaaataaaaataagatacttctaaaaggggaaattacagccaggcaccacagctcacacctgtaatcctaggcactctgggaggccgaggtgggaggatcacttgacaccaggagttcaaggccaacctggatgacattctctactaaaaatacaaaaaattagccaggcgtggtggtgcgcacctgtaatcccagctacttgggaggctgaggcacgagaatcacttgcacccaggcggtggaggttgcagtgagccaagatagtgccactgccctccagcctaggtgactgagcgaaactctgttaaaaaaaaaaaaaaaaaaaaatgaggatcccagaaagaaaaaaagagaggaaataaacagatggaaggaaactgtcaaataaatagaaggaaactttcagagctaaaatgaaagacactcaaatgtcacaaaacatagtgaacagcaaaaaaaaaacaaaaaaacaaaaaaacaaaaaaaaacatgatgtcataaagcaagcgtcctaaaaacataaaaacatcctaaatgtttccacagaaaaaaacaggtcacatataatgggatgaggaccgaatggcatcagactttccagaagatactaacacaacgccttcatagcactaagtgatatatactcccaaaatgtttgggagcaggagtgttgtgaatttgggatttttcagactttggaatattcgcattcctctggttcagcatcccaaaaatccaaaatctaaaatgctccagtgagcattttctgagcatcatgtcagcactcaaaaagttttggatcggctgggtgcagtggctcccgcctgtaatcccagtactttgggaggctgaggaaggcgaatcacctgaagtcaggagttcaagaccagcctgaccaacatggagaaaccccatctctaataaaaatacaaaattagcaaggtgaggtggtgcacgcctgtaatcccagctactcgggaggctgaggcaggggaatagcttgaacctgggaggcggaggttgcagtgagccaagatcgcgccattgcactccagcctgggcaacaagagtgaaactctgtttcaacaacaacaacaaaagttttggatcttggccaggtgcaatggctcatgcctgtaatctcagcactttgggaggctgcagcaggcggatcacgaggttaacagattgaggccatcctgaccaacatggtgaaaccctgtctctactaaaaatacaaaaattagccaagggtggtggtgggggcttgtagtcctagctactcaggaggctgag[132 bp omitted]tcacgccggtaatcccagcattttgggaggccaaggcgggaagattttaagcccaagagttcaagaccaacttgggcaacatggtgaaatcccgtctctgcaaaaaataaaaaagttagctgggtatggtggcgggccagtagtctcagctacttgggaggctgaggcaggaggactgcttcagcccaaaggtcaaggctgcagtaagctgtgatcacaacactgcactccagtctgggtggcagaatgagattctgtctccaaaaaaaaaaaaaaaaaaaaagttttggatttcggattttcagcttagggattcttgacctgtaattcccaaaccacaaaactacacccaaccaaccattctactgtgagaagagaataatggcattttcaaacatgctaggactcaaagggtttactgcccacgtcttataaattttttttgtttgtttgtttttttgagacagagtttctctctgtcacccaggctggagtgcagtggtacgacctcagctcactgcaacctctgcctcccaggttcaagcgattttcctgcctcggcctcccgagtagctgggattacaggcatcctcactgcccctggctaactttttgtaattttagtagagatggggtttcaccatgttggccagactggtcttgaactcctgatctcaggtgatccgcctgcctcagcctcccaaagttctgggattacaggcatgagccactgcgcccagccagaaatgtctgaagtaatctcttggaatattacttgagacactgctctaccaaaacaagaaaataaaccaaaacacaggccgataaacaaacctcaggagaacaggagagaaaaggcccagggtagtggctaaaggggtggctggataagagtccgttgtgattagagaaggaaggcacagagaaccagcatgaaacactcagaggactttacaaacaagccagaaagccaggtaaggcggctgacacctgtaaactcagctactcctgaagcagaggcgggaggactgcttgagcccaaggagttggagttcagtctgggcaacacagcgacacccccatctctaaaagaatttttttttttgagacatagtttcgctctgtcgcccaggccggagtgcactggcatgatctcggctcactgcaacctctgcatcctgggttcaagcgattctcctgcctcagcttcccgagtagctgggactaaaggcatgcgccaccacagccggctaatttttttgtatttttagtagagaccgagtttcagcatattggccaggctggtcttgaattcttgacctcaggtgatccacccgtctcggcctcccaaagtgctggcatgaaccaccgcacccggccaaaaaattaaaaaaaaaaaaaaattccacagaataaatgaaatgactgagagaatggggggaaaatgaaggtatgctaaagacacaatgcaaaaaggagaagtaagggggtattccaaaagccacagaccaaatgtgaagcaagctaaaatagggccaaattttaaccaaaaatgaccaaaaagaacccgtttcacacagacctgactttgagccttctctctggagtggcccagagttcaggacatgggaaacagaagctgaatgaagtcctgccgtcccaaccagcctgatggtgacagcgtcaaacatgtcaacgccgcctactgctagttcccaactcttacagtcaatctataatcggggagcgaaggtcttggtcttcgtcaataagcttaacaacgtccattgtagcctcaaaaagaggggtgcagcagggtcaaaaagagacagggtactggtggccttgccctcctcagtggagagtcagaaaacactaacaaaagctgaccaggtgcaagggtccatccagtcatcaaacacttagtaagcacctactgtatccctgcaggcaccgaacatgtagcagcaaacaaaactgacagaaacctctgacttggggtggggagagggatggacaagatgaagaagtcatatgtacgagatgttaagatggtgctaaggagaaaaccaaagcagaaaacaaaaaggctaagaagcatatggctgtgtgggtgtattgggcaacgaaaccgcgattgagcccaggcagccagaggactccctaaaaagggtgacgtgggactcttctgtgaaggatcccaaaggtaaacaggctcacatcatcattcaaagtcacaaagacaaccaacgcaaaagcgagtcactggactattaaaaacttagagaagacagtggataaaaggggtactttgggataaattctaacccttcaagctggtaaatcagtaagtattgtctacatttaaaaaatcaagaaataagaagcaaatgagctggtattaagaggagtccagagagggctaggaagacagccccggggagggaggactaaggaggccaggaacagcaactttgtaccttacatgtttctaccctatttgatttgtgataatgtaagctggggcggaagtaaaagatactttttaagtacctcaagtatcaatccagaggctggagtgctctaagaggttcactccctctctaaagttttattcaatgccacagagtgtgagctggaaatttactttctgatacatttgatggggccgctatctgcctccaggccccacagacagacagcaacaaacagggctcagctactaatttaaaggccgcctgcaaactgacactgaagcctggcatggtggcacatgcctgccaggagctcaagacaagcctgggcaacacgacaaacaaaaaacaaaacaaaacaaaaaactaaaaactaacccttaagagtgagccccactcactaccccaccttccaggtacttggagaaggtgccatgtcaacgtggtggggaacaaaggtgaaatcaacagcctcaaagtggatggaaatcagcgtccggggcccatccctgtgctccagggacagagaaaaggggaggggtgagggggttggtgaagaagtggagtggatgccaccagagaaaggaaagagggcctggtgcaggaggggcagccaggctcctgctctgccaacgtggcacaaaagcagccacaggcaacacctatgcgggcgggcatggccgtgcaccaataaaaacaggctgcactggcagtggccagacccagcccacaggccagcctgcccaccctgctctaagcacaggtagcggcctgccccctggacccgtctccccgtctgcagaagagggctgtggcgagaagaaaacgcgatcctgcgcacgaagcgctggccaggaagtgctcgatagatggcatgtgtccccacgattaggaagcggtttataaacatctgccgctgtcaggagcctccgcggccatcctctaagaggcttagagagggaggaaggaaaaggggaaaaggtgaagactcaggaaaggagaaatgcagagggaaagagaagccgcaggctgagggaatcgcaggtgggcatcccttcagaatgacaagcctctactgctgtcaacgcccatcacttccccactaggctgcaaaccacttacaggctcagggccagggtcctgggtcccgggtcccgggaagctcttgcttcaacctaagcacacccacgcttgtgcacggctcacctcccgtggcccctggagctcccgggacccccgtattgcagggtagaggggtcaccagcccagccagggctcttcccaccctgaagtgcttcctacagaaagtccctcattcctttatcaagacatcacccaagaagcatttatcgaacccctgtgatgtgccgggctccgggcttcacactggcgactcagcggtaagaaaagtagacgcggccccagccctgatggcgctcaccagaccaccacctcactctccgattccccaccacagcctttccctagggctcacttccccaggagggcatccctgatcataaactgggtgacttcctgcctgtgccccgtcacactgcaccctccaggaaggccagggcccccacgccacaggtggagacgctgacagaatacacgactgaggcactcgtgctgaatcaatgacggcctgaggcttgaagggagagggaagacacggaaaagacagtggtgacatgagctccggcattctttctgccccaaatattgggaattcttcacatggcacacaaacaaacataggcccggtcggcaacttcctgatcactcaccagccggctgacttcacctgtcccacccatgccaacctggctgtgctccctggctgcttcccagagcccgggtctaaatcacgacacaacagaccgccaccacctccttcggttcttcctacgactaactcaacagctggaggtgacacggctccagtgcccccacgccgagggacgcaagctggaacctcatggttggaggggtcctgctgctcctgagggaggggtggagcctggccttgggaggagtgaagacagatgggtccgtgctgtgggcactcagggcttgaggccactcaccgcgtctgggcttggggaagctgtcgtgcagccagaagaccaccttctccacgaagtgctggatgtcacattgctcggggccgcggacaaacaccatccagtcgtgagtgaacccctccgtggtgggcttcttgcgcagttgggcgcgatgccccagctctaacctcacctggacggtgcactggaggagagagaggtggggagatgaagtcagcacacgcctccaagcaggggactgtccccttacccacagagaactttcgataaagacccccagcagtgcaatacgctctcaacccagtgagcagcacacagacggcttcctatcgcgccagcaccttgccgcagacgtcccgtgccttctcccctccgtactcccacacagaccccgtgtctcctctcatccaccgcctcatcctcaattccacccgcacagcctcctcaccggtccccagctcagcccagctcactcctgcctcggggccaccacactggcctaggatcctctgctcctgagacttcccacactggcgcctcttgtcactgggctctcagcttgactgtccctctgcagggaagcctcccctgaccaccgatccaaaagcatccaccaccgctcccatcactctatcatagaggatgctcttccgagcactttcactatcaaaagtcatcttgctgatggctgtcggtgtctctgccacctaagcttgttgactccagcattttcattcccaagcacgcatcacagcgcctcccggaggcccctctcctttccctaagtcatcagctacaacactggctttcagtttcaaaagcagaatgggaggttcccaagaagaaggcagaggccagcctgcggccccctggtgaccggtcccaggtggacccgtggcctgggcagcccagctccctccgctgagcacatgtcgtgtctgacactttgctctgaaatacaaggcagctcaggccagttccatgccactgaacacaaagttgcatgccttcaaagcactcttcatacctaggttggccaaaaccaccaacagggaacctacagtaaatatccaccctgctttgtaaaaacctccccagacttttcacagatacggccctgacacccgctatcaaatacaagaatgttacaaaataaagcagcagccaagcgcacacttgcttctaagtgctgagatagccgggagccagccagaccatggcctgagtcccacaccctcccctgacagagccgccctcccgggccccagaccagacagctcccatctgcgcctttccacgccatcgctcggcaactggccaggtgtgtcccagtggctgcaatccctccagtacctgtctcttctttggcatttcgaggccccgttcagaccccgccacctggctgagtgccccggcgcctggccggcttccctccctctccgtccccctctgagctctcagttgtcacgcgatggagccgctggggcaggcagatcctatcgcccccacccccgcccgccatgttaaagctttccacggcttgtcactccctcagaaggaagcccgagccccgcgcacgtcttccacgcgtgtatttcctcaagtctgagacgctcgtctcttttcatgtcctaacccttttgaagtcagagtccagcctgcacacaggcgcacacgtgcacacacagacacagaagctgctcctgagttggtggcgctgtcctggtatctcagagtcccagaactgaggaaatgcaggaaacgcgcacattccagctcaatcctacagccagccccagacacaccaggaacagccaccctatctctcttcatctcttctagtgccgcagcctgggtgccctaagctcgtttcaaaaccctactcatctcaagtcctggctcacacgctgccctgtccagggccctttctggtagccacgctggagaccaaccttgagtccccacagaagcctgtggacagctccacgggagccccttcatcccatcccccgctcctgggttgctgacgcagcccccagggcccctgtgaactctctgagagcagggactacatcttgttcgtcctcttagcctctatcttgaaaccacgggacaggaggcctggacgatgctggattaattaaaccagagagcctctcaggtcagggagttctaaatgctgcttttggagacggcagggccatggtggcagataaggacaggccagttccagcatgtggaagaactggccagagaggctgagggtctgtgcgcacagcaagccaggtataagaaatgaggcggaggcgtgcaatttctatttggcaacttaaaaagtaaactgaaacatgtacatgatacagatgtacaatttttatttgtcaactaaaaattaatttttaaaaggaaagggggcagaggggattcccttggctcaggacgactgtccctctggagttccctgggaaaagagggcagggactccctagggaccaggcacactgcagggggtgcctgggatcaggccggagacaaaagaaataacccgtcgtcataagtggctgacagatatgggaaacggtctcggagtcaaaagcccccggccctctgtgtaaggcctggggtgcaggcagaaaagggcgaatggcaaactaacagcaaccccagcccatgaggaggcaaccagaaggagtggctggaaaaaggggtgaacacagcccaaagccacagaactgacaggacccgagggtggaggacattcaggtaaccccaagatccgggcagcagggacattcacgaccccagtgtgggaagaaagtggggatggacggaagatcaggcgcactcataaacccccggcgctgcggattcatgaggatctcaggtaaaagtacccccaccaaacacacgaggtgagggctgagcaccggcatggcaatactcaggccaagcacgagtgtctgcctgaacaccaccgcattccaacaaacccaaaacaacactgacattagccccgagcggccatgaccaccctctatgcttacacgcctgcgcctctgcctttttcgctagaaaacaggaaggcaacccctgtcccgctgggagcattacaggtgaaaactaaatgtacatatacatcatgggaacagcaccaggatgcgggagaacgacccctgcttctgtggagctgactcccacacaatgacagtgtctcctcggaatcgcttattcactgacccggccactcagacctcggccgacttcccggcatttctgatgacagggagttcctacccagggcacgcaggcggcagagcagttattgtgaaagagtgaaagaccgcggttccactggagagggggaggatggaagcaccagaactccaccgcagtggccaaagtaaacaggaaggttccgaggcagcgatgggtaatctttgcagccggcaggccgggcccaaagtgctgcccaggcgacactgatgccctgggggctggcgccaacttgagcctcaacacccactgttaaggacacaccccagacttggccaacagatgcgaagttcgggtgcccggcctgctgcacccaggggactgtggagcgctgaggggggcactccccggaagggtggaataacagagtctctgctgttgtagtaaaaaaggaatcacagattcagtaagacgctcaagccacgtcaacgggaggcaagaagtggagccccggccaacgcgtttgacttgtcaggtcatgataatttattagcacagctaagccaattccatagccaagggtaaccaccccccttcccccacaccacctggactctttccttggccattaggaccaaagaattgaagctaatcaattagctgtctctctaggaagggtgcctggctgcagaggttaagtgacaggctctccagaatgtcttagagtgaataatctgattggtcagtggctctcccccaactttatcccagcaagttccttcaaggcaccaggaatgcctgctgctgggaggccacttttttggaacctctggaatagacggctggaaatgagccggggggctgtggtctcagggatttccacttccctgcacctctgggaccaccctgacacccactccccaacaaaagcccaggataaaggggaaccttccaggactgtcccggaaagagctgtccgtctcacttctgggaaaccatctgaaagacagcggacggagggatgggcacgagcgctccaagggccatctggggacagttaggcttgggcagagggcctcagctgggacactgccctctctccaggccagctggcagagggcacttggaaccaaagggccaaaatcccaaatcaggcaaaccaggcagcctctcgagggcagcttccccggggctttctcaacgcagcgtgcggttctccccaggtgtgggctacagcggccgccgcctggcaaagagccgcgagccagccttgttccaacagcttcacacaattccttcagccaatgtaccccacttcctgcaagccctgaaggcaggtcttcaacaaccagttcatctgaagatttcccctggtcttctggtgggaattctcaatagatgcccttcctctgggaacttggacttcgcccagtggtggaattacacctggagttcggctactgcatctaattccctcggaggcaacgatcccctcccatcccaggagaggagaacactgaggagtcgtttcccccttcagcctaaattgattttgaggtcctcctgggctgaacacgtgcacgtgtgtgagccacacatgcacaaacaggaagaggtgacgaggcttgggcgatcccatggagcgacggcaacatgagacccaataaaaccccctgcggaatcttctcccgccaagcccagtcggggccctcagtggtaaccactgaattagaatgtaagagatggggaaagacaggtgcccctctgtgacagtcctctgaagcggagagctgcccacccagaaggcaggggcctctcactaacaggtacaccgggtcctggtcccctgactgctggcacactggggctaggggccagcacctccacccctcttctggctccatctgtcctcgtccctctgacccaaggcacaatgacaaagcgatgagaaggcactcaatgaatttctctctggaaactctctaagagtggtgtgtagaccacctggaaatgcaagttcccctttatagggtctgcagattcctggtaagactgactctctgaccacattgtcaggggaggcctgggacagagtatttacgaaccaggggcccacagacgtgtagacagtgtaccggctatctcccacgttctccaggggggagggggaggagccttggtggactttttgaatgtgcacaaccccaatacaggcatctgtcaccagaccaggtgggcctggctgcaaagggactgattcctagttacttgtatttaaccagcagctggcaaagctgagtgcaaaacctcccattacgaaccacaacgggcataaagggaaatgggactctggtccctgccctcaactgcttcacaatataatcactttaggacaaaaaaactggcaggtcagctttccagggagtagcttcagagctgggagcaggtgaggaatctgtcacacctcagccagcaacctgggtaattcggagcttttcgggcaggtttggggagcagccgagttgcaggaggaagagtctacccacccttgcctgctggtaggacttctgagcctgcatttccacatctgtgaaatgggcccctggcatcagaaacaaactttccccgctgaagaacatcgttgtgaggcagctgctctcaaacccaaacctaggagagcatctgcaggaccagcaagcagcaattcgagcgtgggggtgctccctggtccttttgaagaacgtgaccgcccagatgctgacaccacctcccagctccctaggcagccccagtccccgtgacctgctctcaggccctttcccaatctcttttcggcatctgctcagccttatccttgtcacgtcccagtcccctccccccggccccagcccaggaaacaaaccacactccttccagacataacccttaagtgagcagggaactcgctcatccccctgccaaaaaaaatacaaataccacagacaacaccagcacagacttggggcggagggggaatcaaacatgcgggttacggttggggcaaagagaaccagaaaggcattttcctggccataaggaaaagatgtcaatgctgagaagctgggagcccagagcacagtgggaaatcctgcttcttaggggggtctgaaagtcctagagagtaaaagaggaaggcaaaaagagaatcaaagcctcccaaagccagcgactgggcggaaagctgtgctgtttcccactataatgaggcactaacattttgtggcatctggggggctagtgggagcggaagcccgggttctgctcgattcaaagcattttccctgtgccaagagtcccgcagggacactgaccaccaactcacctacttgagtaaaagataccattctctcctgtttccccaggggcctccggctctgtgaggaagggacagaacccttgggcctctctcaaatttgcatgaaagctttgctggggaagctagaatcagactttgggtccaaacacacttccctccaggagcagcttcccttgcaaacacttctgcaaggagggagaccatcaccatcgacggaactttctgcgatgatggaaatgcatctgcattgcccgacagggtggtcagtagctcagtagctcagtaatggtggttactgagtgcttaaaatgtggctggtgcgatggaggaactgaagttgtcattcgagttagtttaaatgtaaatcagccacagatgctggtgactgtggtaccgggcagtgcaaagccagctctctcccacacctgtccacctgagtgagacctttatctccctctgtcgcagaccaggaatgccacccatttccaccatcccacttacataagtgacagccacccagacctccagggttccacacatcacaaggggaacagacacgcttcggcctaggacatctcccccagggactaaggaaggaggaaaggggccataccctatgcctctgtgtgcccagcgggacttgcctggaggtgggcttcattgaaagtggacactaaaggtatatttcatttgggtttttaactcaatacagattggaagcaacaagctctgtcccttcaacggaaatcaactcacaccacgccgtggaaatccaccaatcaactgctgcaaactcttccttacctcttaagaagaaggcagcaacacccaaaccagatgggaagccatgggaactgggtgccagaagcatgagacacctgtctccatgaccctgtgccacaggcgccgagatgggcaggagggaggattcttgccccccacccatgaaaccacacagacagtgccacttcagtggcgccagcagccagggacgccccaacctgccctctctaacggcggagattttggctgccacccccacagccccacaacacctttcctggcctggtgcccctgaaagccagggcagcagaggaggaggaagaaatgatcccatgttgggggccagcaatgcttctgggcttgaggaagaggggtaggggcttgggtattggagaagaggcagcgcagagttgggtaaagggggtgccagggtgcaggaaggcctcgtgtttatgagaaccaacacagaccaatggggaggggccgtccagagcgtttagggaggttggggaacccacccacccaccctgggtttcaactgaggctctaagatcctgggggaaaaaaacagaaaatgaggtggaaggagggagagggtagtggctgaaagagacatcaggactcatcaggctgatgggcgttagatgaagtgggagatcctgaaggcaaaggttgtacaggagactgcaggactgtgacgtgaccaaccagcctgggagggagatctggactggggtcaagtgtggggaagcctaaatcaggatcccaggggcggagagggcccaagctgaggggaacagcaggccatcagtgactcaaaggtctggggaatccaggtcagagaagaaactgctcctggtcctggtctcagagcagagggtctgaaggtgaaagagacagccccgccgggtccgagggagagtgaccagggcctgaaactagaagggggctgaggcggcagggtgggtcaaagaaagaagtctgaaaaagcaagtacaaagagaggggacactccaaacaggcctgagtccctgcagcagaagaccgaaggccagggtcctagggagtcagaggagctcaggccagggctggggttgggagagaaagggatgccctggctgcagccggggcaggatcagacgggagagaaggctcaggtccaggtaggggatgggtggagataaagcttaggctgggccggggttcaaggaagagagacgccgcagagcagggtcccagggggccggggacgcctcatatctgagctgaggttgaagggaagacagacagcaggttggggactctgggagtttgaggcgactcggggacaagggtccagacaggaaaggagacagtgactggccctggacctagagacggaaaggtctactgggcagatccgaggggccccgggaggggtctgaacagggcccagatcccaggaagtgcctggaaggagctctgggccaggctgaagtcccgagagctgtcttgaggtccctaagccgggctggggtccccaggggcgtcccaggtggatgcaggtcggactggcgttccgaggggtctcccgggggtctccgagccaggctggggggtcaccaggggcgtcccaaggggctccgggcccggcccgggtcccgaagggtgtccgaggcgccctggccggggtcgcggatgggggaggggcgcccccgccccacataaaggcccgaggagcggcgggcgcgcacaaagcgggcgggcgggcgcggagcggggaggccgggaccggggagggccgggcgggccggcgggcgggagggggccgggcgggctgcgcaggggcggcgcggccgctcctcacctgattgtccatggctggcgccccgccccgcccccgggccccgcgtcgctcgccgccgccgccgccgccgccgccgctcaacgccgccccgccgccctcattgtctgtcaagcgccgccgccgccgccgccgccgccgatcccggccgcccgctcgcccgccagccccgcggaaccggaaaccaccgccagcccgggtcgcgcaccgatcacgggcccccgccgccgactagggcccgccgcatcgactgacagccacctgggccaatcgacggcgcggacggccgcttgtggcgcgggacttcctgcctggcgggggcctgccgggctgcggccggagggacgaagcccgcagccaatgggaggccgggaccggaggggcgggaggagggagggagggaggcgcgaggcgagcctggcggaggggagcgcgaggtgtgcgccgcacgtggaggggggcgggggcgggacgggcgcgcggcgcctgcgcgctgcggcccgcagggggcgctgcctcgtggctggagcctccagggcgggagcgtcccgggggctggaactgaggttacgggttcgagccctgtggagggatcccccagcccccccggtagggacacttttgtttcctgacctcatgatgctgctatgtaatggaacgagccctgggctctggaactggagattaattttcttttcttttttttttttatgagacacgtctcgctctgtggcctaggctagagtgtactagcacgatctcagctcactgcaacctccacctcccaggttcaagagattctactgcctcagcctcccgagtagctgggattacaggagctcgccattatgcccagctaatttttgtatttttagtagagacggggttttgccatgttggccaggctggtctcgaactcctgacctcaagtgatccgcctgcctcaacctcccaaagtggagattaattttctaatcttgcataatccttggcaaacctggtcagccccttcttcacctttccctgagtctcagtttgtgcatctgtgaaataggttgaagaacagtactgtgtgattcttcatgctaatttgaatgatacaaatttgaaatcgtgctacattcaaatgacccaagagagtcacatgttttcagttagacacgaagaataagttctggcgatccatcacacagcaaggtgactacataataatgtaattttatattttaaaattgctaaaagcggccagatgcggtggctcacgcctgtaatcccaacactttgggaggctgaggggggcggatcacctgaggtcagaagttcaagaccagcctggccaacatggtgaaatcccatctctactaaaaaaatacaaaaattagccgggcgtggtggtgtgtgcctgtaattctagctactcaggaggctgaggcaggagaatcgcctgaaccagggaggcagaggttgcagtgagatgagatcatgccactgcactccagcctgagtgacagagcaagactctgtctcaaaaaagagaaaaaaaagaaaaaaaatgctaaaagtggattttgaatgttctcaccataaataattgataagtatatgtggtgatggatatgtcaattagcctgatttgtttattccataatgtatacatgtaccaaagcatcaaggtgtaccccatacatatatacagttattatttgtcaataaagattttttttttgagatgaggtctctgctggagtgcagtggcacaatcgtggcgcactgtaacctagacctcctgggttcaaacaattctcccacctcagcctctcaagcaactaggactgactgcaggctcatgtcaccacgcccggctagtttggttatttatttatttatagaaagagcgatctcactatgttgcccaagctggtctccaactcctggcctcaggcaatcctcctgccatggcctcccaaagtgctaggactataggcatgagccactgcgccctgaacaaagatataatttttaaagagagaatctcatgttatccacaaaattttaaataatacccatctctcaaaaaactgttttgatttattgaggatcacaaaattttacaatgacctgtaaactgtgtttatgtgggaaataggcataaccccattttttcaggactttataagccacttgtctcttggacattaggacttctgcctgtgatttggggatccttgtgcagttattttaattccttcttgtcattaaaaatcgggttgtcatttacaagaaagaaacaaaccaccccattaaaaagtgggcaaaggacatgaacagacacttctcaaaagaagacatacatgcggccaataagcatatgaaaaacgctcaacatcactgatcattagagaaatgcaaatcaaaaccacaatgagataccatctgacaccagtcggaatggcgattattaaaaagtcaaaaaacaacagatgttgtcaaggttgcagagaaaaaggagcacttttacactgttgatgggagtataaattagttcgaccactgtggaagacagtgtgacgattccttaaagacctagaggcatgaataatgttcaacccagcaatcccattactgggtatatacccagaggaatataaataattttattataaagacacatgcacgcgtatgttcacggcagcattattgacaatagcaaagacgtgaaatcaacctaaatgcccatcagttatagactggataaagaaaatatggtatatatacaccatggaatactatgcagccataaaaaggaatcagatcatgtcctttgcagggacatggatggagttagaagccgtcatcctcagcaaactaacgcaggaacagaaaatccaacaccacatgttctcatgtataagtgggagcttaatgatgagaacacatggtaacatagtggggaacaaaacacactggggcctgtcagggggtgtggtggggggagggacagcatcaggaagaacagctaacaaaggccgggcttaatacctaggtgatgggatgatctgtgcagcaaactgccatggcacacgtttacctatgtaacaaacctgcatatcctgcacatgtatccctgaacttaaaagttggattaaaaataaataacccctctttaaaaaatcagattgttggggcacacgttgttgggatctcctgtgagctgtgtcatgggcaaaaagtgataaaattgtttaaaaacgaagaaaaaattgaggcgggaggatcacctgaggtcaggagttcgagaccagcctggccaacgtagtgaaaccccgtctttactaataatacaaaaattagcctggcatgatggtgggtgcccataatcccagctactcaggaggctgaggcaggaggatcgcttgaacccaggagatggaggttgcagtgagccgagattgcgccactgcactccagcctgggcgacaagagcaaaactctgtctcaaaaaaaaaaaaaaaagaaaagggaaaagaaagaaacagattgttttctcacttaagtgtcagtcaaacatttattagctagtggggccagtgtttgcactgaagaacaaatagcaccagaaaatgagtaactttggaatgaaagtaagtccagataaaaactctaaagaaggtcaggttgctgtcatggtaataccaccatgctttttaatcaagggcaggtggtgctggaaagaaaaaaaaatggagatcatgctgagaaaataagcagtgatttaatgttgataatttttttttttttttttgagacagggtcttgctctgtcacccaggctggagtgcagtggtacaaacacagctcactgcagccttaacctcctgggctgaagcggttctcccactcagcctctcatgtagctgggaacacaggcatgcacctatttagatatgcctatttcccacataaacaccacgcccagctaacttttaaaattttttgtagatggccaggtgcagtggctcacacttgtaatcccagcactttgggagtccaagacaggcgggtcacatgaggtcaggagtttgagaccagcctggccaacatggtgaaaacccatccctactaaaaatataaaaattagctgggtgtggtggcatgtgcctgtaatcccagctactcgggaggctgagacataagaattgcttaaacccgggaggcagaagttgcagtgagctcggagccagattgtgccgctgcactccagcctgggcaacagagtgagactgtgtctcaaaaaaaaaaaaaacaaaaaaaccgtcttgcccaggctggtctcaaactcctgggttcaagcaatcctgctgcctcagcctcccaaagttctgggatgataggtataagccactacaccgggccgtaacggactctcgctctgtcgcccaggctagagtgcagtggcacaatctctgctcactgcaagctccgcctcctgggttcaagccattctcctgcctcagcctcctgagtagctgggattacaggcattcgccacgacgcccggctagtttttttgtatttttggtagagacagggtgtcaacatt[135 bp omitted]agatcagttgctctaagtagtccccaaagcagcagtgtgagcatcacttgggtatgttgctataaatgcacattctggtcttcccccacccttgtttatggaaccagaaattctaagtgtttggacagcagtggcttaaccaaccctacagatggttccaaggctcacctaactttcagaatcactgtcccaggtaaagggacaaaatgggagtcaggggtagccatctatcttttttttttttttcttttttttttttttgagacagagttttgctctgttgtccaggctggagtccagtggcagtctcaattcactgcaacctccacctcccaggctcaagtgttcctcctgcctcagtctcccaagtagccaagaataaaggctcataccaccatgctcagctaatttttgtattttcttttttttgtggagacagagtcttgttatgtttctgagtctggtcttgaattcctgggctcaagtgatccacctgcctcagcctcccaaagtgctgagattacaggcatgagttaccatgcctggccagcatctgtctttgaagaaagcttgcaggaaagaacctttagtctacacttgctacaaatatgagcttctggaactcaatcccctcccccttattcagttgggaaattactgttcacttaggttctaaattgttgggaattttcaaaactgcatcccctgggctcccactggctgaggtggaatactttgaacatcgaaaagaataatggggaagggccgggtgtggtggctcacgcctgtaatcccagccctttgggaggctg[259 bp omitted]caaaaaaaaaagaaaaaaaaagaataatgaggaaggaactgaatgtctactgacacatgagcggataaactaaacatggtttatccatgcaatagaagcttattcaaccttagaaaggaagaaaatagggtgtagtggtgtgcacctgtagtcccagctacttagaaggctgagacaggaggattgcttgagcgcaggagtttgaggctgcagtgggctatgattgcactgatggcagtggctggccatctggactggccaccaccatcttactagctgcagcacagaggaatggccaggactgcatgttccatagatctggcagaagctggtgacaagtgggagccccgccccttctgcattggggtgggagctccctgggtggtgctgcagccactaaagccatggctacagacctgggcattactgggctctcaggcccagaggcaggcaggagccccaccctcccaggtgcagctgcagctgtccaaactgcagctgcagattaggagtccctgcactcctaggggcccgggaaggttccccctgcccttgcaggctcagaaatgtctgcttccactgcttggcttctccctgctgttggtgcccactccatctcaaagcaaagttggggctgagccccagagctgttgcagccaggcagggtgtgcacaaacttggggcagcacagacacaccagccccctgctacctcagccccatctggacttcgggcaccaacgagcataggagggaagccaaagggggggctgagggcagctcagtgctgacctgcatgcgccccttggcacctatagcctgggcaccatcaacagcagcaggaggtagacaggttcctggatggaaggggatgggtccctggtgaggccccaccttcaggccagggagggcctgaaggctaggggctgggctaccagccccatggactggagtggaaacatgtgatgccttttccaggcctgctcatggaccaatcagcatgcattttttcccctctgaggcccataaaagccctgggctcagccaaagctgggcagatatcgggatgaccagcttcagagagcagctaccaactccagggcctcctctctgctgagagctgcagagacgtcgggactaccagctgcagagaggagcaactcactctaaggcctcttctttgctaagagctgggatgaacatgggatgacctgcctgcagagagaagcaactcaccccagggcctccttctgctgagagctgcagggaatgatggcacaacctgcttgcagagaggagctacccactccagggcctcccctctgctgaaagctgggcaagcaatgggacaacctgcccgcagagagaagctacccactccagggcctcctcttcactgagagccacagaaaatgacaggatggactgcctgcagagaggagctacccaatccaaggcctcctctgagctactctgtcgctcaataaagctcctgttcaccttgctcaccctccacttgtccacatacctcattcttcttgggcacaggacaagaattcaggaactgctaaacagcagggctgaaagagctataaaacccacagggctgaaacatgcgccttgccatgttgtgggtgaagagaaggagagaagagctgtggcccttcagggacctaggagctccctgagccagggctgtgactccctctttggaccccagtgtttcctatagtctccaagcttctgagtgccactgcattccctggtggcagctgtggaagctgcttatggtgcacctggtctggccgcagcctctcagagagccagggcccctgccagcacctggagctgtctgctctgctgcagcagctggtgtgcctggctgcatgcagtggccggacctcatgcttgcttgcttgctcacacacccctcgcccctccatgcctggcttgcccttggcaagtgtgagatccaggctagtagtgtgagctgagcacagcctgccaggccgtgtgggtggaatgagcccagtgggcccgagcaaaactcaggcaaaggtgccaccagccacagaggtttccaaccagaaatcaacaccccaaggatcctgcaacatttttgagggctcgtccaggatctgcagaagggtgagtgaaagggtgagtaaaagcagatctgctctttctgtccctttttaggagtccctaaactcaacaatagctaaaatgaaagaaaaacaccaggcctctattagccagttaaaattaactagcagagatgctggacttaaaacatggatgatagccttgctggggaggacactgtcaatccctcatcatcctcaagtgttgagaatgttgggtttgtttcaatcccgtttccttccatgaggtctacctgttacatgggaccagaaggaggtcctggggcaactgagggtatctggctgaggctatgcctcagtgttatccaaaggcccctggactaactcctgaaactcaagtccctaagcgcccattagggtgttgttggcactaggacctccagtctcctatctttctttctttcatggttgtcaaggttcttatctcttcttttttttttttttttttgagatggagtcttgctctgtcgcccaggctggagtgcagtggcatggcatgatcttgactcctgaccttaggtgatccacccaccttgacctcccaaagtgttgagattacaggcatgagccactgcacccagctcctatctcttctttatatacaacattaaatttctgtgcgcacgcgtgtgtgtgtgtgtgtgtgtgtgtgtgtgtttgagacagagccttgctctgtcgcccaggctggagtgcagtggtgtgatcttatctcactgcaacatctgcctccaaagtagttgggatttcaggcatgcaccaccatgcctggctaatttttgtattttaatagagatggggtttcaccatgttgggcaggcttgtcttgaacacctgacctcaggtcatccacctgcctcgccctcccaaagggctgggattacaggtatgagccaccgcatccagcctacaatgttaaatgttaagaatgttgctgcaaaacagagaaattactggatagaatgagcatttggcttagtcatcaaaagtataaaatggaaggttaagagtagcacagatgagcaaagtgtgccttggtatctgtacataattttgtgggaaaaatgttattgtcatttccttggttgccatcttggtgcaaggcaccttgaggcacagaacagaagcatggcctcaggaaggaagcttttctgtaaacacaagggcaaataaatggtccaaggtcccatacatgcaggccttctttgccttgcagggtaatctggacctttgccaacattgtaggattgattcagctgtcctaatggccttctcaggagaagctgcaaggggtaatcccagagaaatagggaagcataccccagaggtacctccagcaggggaatcaatcccctcaactcctccctatccaggttctctctcaagcttgccccggcatagtaatccttgtttaaggcaggtcccagtctcaactgcccaaaaacagatgcctggtgaatatggtcccattgaagttcagttttccttttctctatagaacttaaggcaaatttaaggggagatcttggcaagttttcagatggccctcacaggtatatagagagtttccagaacttaacccaagtatttgagctctcctggaaagatgtcatgttactcttgtttttgtttttgtttgagatggggtctcactctgtcatccaggctggagtgcagtggcactctcttggctcactgcaacctccacctcccaggttcaagtgattctcctgccgcagcctcccaagtagctgggactacaggcatgcaccaccacactggctaatttttatatttttagtagacatggggttttaccatattggccaggctggtctcaaactcttgacctcaagtgatctgcccaccttggtatcccaaagtgctggaattacagccatgagctgcacccggcttcatgttacttttgaatcaaaccctgaccaccactgaaaagcaggccaccctgaaagtggcacagaattttggggatgagctttatatcttatatagggccagggaaggggatgagacttatctgattggaagaatagcagtaccactgaagaaccctaaatgggacctcaatgatgagacaaaagaatggggccaggcgtggtggctcacacctgtaatcccagaactttgggaggctgagatgggcggatcatgaagtcaggagatcaagaccatcttgcccaacatggtgaaaccccatctctactaaaatacaaaaaaaatagccaggcatggtggtgcacacctgtagtcccagctacttgggaggctgaggcagggaatcacttgagcctgggaggcagagattgcagtgagctgagatcatgccactgcactccagcctgatgacagagcaagactctgtctcaaaaaaaaaaaaaaaaaagaaaatggaaaaggaggccaggcacggtggctcacacctgtaatcccagcactttggaaggccgaggtgggcagatcacgaggtcgggagttctagaccagcctgaccaacatggtgaaaccccatctctactaaaaatacaaaaatgaattagccagatgtggtggcacatgcctgtaatcccagctactcaggaggctgaggcaggagaataacttgaacttgggaggtggaggttgcagtgagccgagatcatgccactgcactccagcctcggcgacagagcaagacaccatctcaaaaaaaaaaaaaagaatggaagaggaaacactttcaggtgtgcataccagagggcatacgaaggactaggacaaagcctctcaattacactaagctatccatggtagacagggattaagcgtgagtcccactgccttcctggaaaggctaagagaggccttggtaaaacacacctaagtcctgattgaggagagggacatctgatcctagaggatgagtttatgacacagtcaggccctgatgtcaggagggagcttcagaaacaggctgcagggccagatggtactttggagggcctcctgggagtggtcaccttagactttgctgtgggaacttggaggaagtccagaaaagagagaggagatacggaaaaaaaggcaaaagctctaatacctgccctgaagcttcacggactccatagtccctgagatgcacccgttgtctgctgcaaatgtggcaggccaggccacttcaggagagactgtctgggcagtgcggggaggccacctcaaccctgtctggtttgcagtgggaaccattgtaggggcagcctgtccctggagacacaggttgccgggtccaggaccagacttccagatggtccagaaggacagatggattctagggctcctttcccaagctctgatggttcagaccactattaccatccaggagccctgggttgaagggaggaaggtagccacctcctggactctggagcaggcctttcagttctcctccccaacccaggcccccttcctctcttagcacgactgtaagcagcatctcaggtcttcttccccaccacgccaggagtcaacatagtcttgtgactacagggagcttttctctgtggggttacttttgtttccgttagggagtgtattagttcgttttcatgttgctgataaagacatacccaagcctgggaaggaaaataggtttaacggactcacagttccacatcatgaggagattctccagagtctgagggtcaaaggcgttccagtgatttatttatttatttattttttaagacagagacacgctctgtcacccaggctggagtactgtggcacaatctcaactcactgcaacctcacaatcatggcagaaggagaaaggcacttcttacatggcagaagcaagagagaatgaggaagaagtgaaagcagaaaccctttatgaaaccatcagatctcatgagacttattcactaccatgagaacagtatgggggaaaccatccccatgattcaatgacctcccactgagtctctcccacaacatgtgggaattatgagagtataatttaagatgagatttgggtggagacacagagccaaactgtatcagggaggcaccttattaggtcaggtccccaatttctgggactccctttctctcccttgtttgaggaggacctggcctcacggcttcacctgcttatgatagagaggcagtagaggagcagccccctccagttgctatctgcaatttggcgagggccacatgggactaatttaatgggtccatagacccatctgagtcaccttttttgtcccaagcttcactttaaagtcctgaaatgggacattagacctgaggcagatgacagcaggagttgagaggcacagcccaggtgagcatgactaattcctgccagttagccctcctgcttcatggatggaagcatagataaggtctagggaacccaaaggttaccaacagcagaaggatagggtggtatgtaggtaagtgcgaatattcctacccactaggccttcccgctgcatgggtgaaggttgcactcgcagctatgagtggcacctgcaaaggtcactgggactcaaggatataaggttggaagaggaaaaagagatgcctttttaaaaaaatctccatcacgtaccccaggtattcactggaaagagaggaacaaagggatgtctttcccctctttccagatgggtaagcaaccaatcattttcagcctgcactcctctcaagtgcattctaaattactggaacgcagccgggtgtggtggctcatgcatgtaatcccagcactttgggaggccaaggtgggtggatgacttgaggccaagactttgagaccagcctgaccaacatggcaaaaccccatctctaccgaaaatacaaaaaattagctgggcatggtggcacatgtgcctgtaatcccagctacttgggaggctgaggcaggagaatcacctgaacccaggaggcagaggttgcagtgatctgagattgtgccacagtactccagcctgggtgacagagcatgactctgccaaaaaaaaaaaaaaaaagaagaagaaaagaaaaaagacactggaactcctttgaccctcagactctggagaaaaaaacatttttcctttattcctcctctgttctctcttcacagatgggtaatcacacctctgtaccacaggatactcccctgggatccatcccgcaaactaggaagagtttaatttccccaagcgttaaactgcttggcaatttcttgaggagggacaacttctctttggctgttccccttcacaggactccagggtcaatagggctccatggctcaggggaatggaacccagaagcctgacatgctgacaaaagggtaagagtttttagcagttggacttctggcttctctctctctgtgcaagctggttgtaggaatgacaaaaactgtattctctgcccctccatgagttcaaaagtcagaagtattggccatttggcatggctaaggtcaggtagtaacatattttaaaagatttcctttttttttttgagacagagtcttgttctattggccaggctggagtacagtggtgcaatctcagctcactgcaacctccgtctcccaggctccagcaattctcctgcctcagccttccaagtagctgggattacaggcatgtgccaccatgcccggctaatttttgtaatttttagtggagacagggtttcaccatttggccagactggtctcgaattcctaactgcaggtgatccacctgcctcagtctcccaaaatgctgggattataggcatgagccactgcgcctggcca[135 bp omitted]accgtctccactaaaaatacaaaaaaaattatccaggtgtggtggtggacacctgtagtcccagctactcaggaggctgaggcaaaagaatggcatgaacccatgaggcggagct[132 bp omitted]actataggtatatttaaaaggcctttatgtcgtttatcgttgtagattttgtttttctggaaaaaggtgttttcttttcggtcaactgaacaatttttctccatttttgtcttgccactcttaatgcacacatgaggggttccaggatgacttctggtggcctgggactccttgggaaaaacagaggaggcgccactgatccgttttgggaaaaacctctgttttcctcaggaacttcaggaattacgggcagatggatccctctcaaaatctatttttgtcttccagctatgcctacttattaagccttagaaactacatgttttcctagccctggttctcgaagggctccaccccccggccagtaatccaattaagaaattggcacaagaggctgggcacggtggctcacacctgtaatccaagcactttgggaggccaaggtgggagattcacctgaggccaggagttcgagaccagcctggcagcatagcaaaaccccatctctactaaaaatacaaaaactagccaggtgagttggcgggcgcctgtaatcccagctacttgggaggcagaggcaggaaaatcgcttgaactcaggaggtaaaggttgcagcgagccaagatcatgccacttggacaacagagtgagactctacattccagcttggacaacagagtgagactctgtctaaaaaaaaaaaaaaagaaaaaggaaaaaagaaaaatcttacaactactagtggatctcctgtctgtcatatagttatatatgtgttgtatgtgtgatgtttatataaaagaactctaactgattagcttaaggaaaaataagcacttaggtcaaatattcttgaagaaaaatagaaactgcaatgccttttagttctcatgacttaatcttagagaaataaaaatagtcttaaagattattggtaaaataaaaatgacttcaaaatgtagacatgtggtccaaattatgcagctcagatattaggtttgctaaatgctttaaagtcataaactgcttctttggcttttgaaaactgtttgacttgcctgctttatggtttggtaaggactagggacatagggagctaatcacacccctagatatgctggaaatattcagatcttatctgcacctaggacataattaaaataacttactaggttttcttttttttttttaactaggttttctttttaccaaaaataagaattgctaagagttaccattataacatgtaattgagactcctgaaaatagacttacatgcaaagtatataaggaaagtaaactgtgtctttagttaaagaatataagaaggcatgggaatgtaaatttttgccaaatttagaaatttaaaggattgttttaaattagataagataaagctaagggtttaaacaagttatagaaggtttgtaaaaattaatcttataaaaggaattgtgtgtgtgaatatattgactaaattctttttttttttttttttttttttgagatcactatgtcacccaggctggagtgcagtggcacaatcttggctcactgcaacctccacctcccaggttcaagcgattcttctgcctcagcctccctagtagctgagattacaggtgcatgccaccactcctggctaacttttgtatttttagtagagatgaggttttgccatgttgtccaggctggtctcgaactcctgacctcaagtgatctgcccacctcaactccccaaagtgctgggattacaagcatgagctaccatgctcagtccatattgactaaattcaaaagggtattatttggttttcctgtaagttgaacattggaatggaagcacgatctgctattcttagggcactgatctgcggtttcataataaatgttataagcctttagtatgtttgataggcttcccgaaatcacatttcaacttcaaaattgtcttttctaacccctagcttttggatgctacagaggatccctggagtgtccagggaagaagtagacaggatgatttgacatgtttagctacataggattgccaaaataaggtggtgtttggtctccggtgggttgcatttcagtgaataatgttaatgtgtattccaaaattgtatgggatttctaaagttctgacgtctgagaaagtgttatgaatcataattagggttattatgttaggttattgtagaccacagtggttaccaaatttctttgtcaatcatgattttgactgtgactaccctaggacattttgacattcataggcaattgttgtcttgttttttatgtttgtttgtttttgagatggagtctcgctctgttgcccaggctggagtgcagtggcgtgatcttggctcactgcaagctccgcctcccgggttcacgccattctcctgcctc[222 bp omitted]cctcaagtgcaggtttctgataactttggagattgtgaacaggagttgactgggtgaattgaactaatggaagaccaaagtaatcattcttgattttttgcttggaacattgctgatcccttgttttgtttttcagaatcaaggaagcttttctttccagctattgtagcttttgacatttgtaggagtgaaccaatcagtgatctctgactgcagctcagaagaaactaaagggacagactgtcaaactccaaatggtgatgcaaatggagcctcagacgatgactcccttttactgggagcccttagataggcccccgagggaaaatctgactgccatttttctgaaaacaat[144 bp omitted]ttccccgtctctactaaaaatacaaaaattaaccgggtgtggtgtcacgcgcctgtagtcccagctacttgggtagctgaggtgggagagttgcttgaacccgggaggcagagattgcagtgagccaagattgcaccactgcacttcagcctgggcaacaagagtgaaactccgaaaaaaaaaaaaaaagaatagtcatcatccctaccctaacagcagttagacgtacctcttcagaggggagtttgatggctgtggcagggccaagcaggagtcccgcccctcctgagttgggatgagatctctccaggtgcagctgcagctgcccaaaccacagctgcagagccgggcctcccactccacagagtaaacaggagtcgcacacacccccaatgcagctgcagccacccaaacagaggctgtgtacccaggcatccctgcactcttggggtcccaggaaggtttccctgccctcgcaggcttggaaatgcctgctcccactgcctggcttctccctgctgttggcacccattccagtctcagagcaaagttggggccaagcccaggcactgtcacagcccagctgggtgtgcacatgcttggggcagtggtgacactccagtcccctgctgcctcagccccctctggaccttgggtgctgatgagcataggaaggaagctgagggaggggttgagggcagcttggtgctgacctgcaggtgccccttggcatctatagcctcatcaccacgaacagcagcaggaggcagacaggttcctgggtggaagggggtggatccccggtgaggtcccaccttcaagccagggaggccctgaagcctgggggccaggctgccagtcccacagaccagagtgggaacttgtggtgccttttccaggctgcccatggaccaatcagcatggacttcctcccctctgaggcccatcaaagccctgggctcagccatagctagacagatatagggatgaccagctgcaaagagaagcaacccactccagggcctcctctctgctgagagctgagcacttgacatgacgactagctacagagaggatctacccactccagggcctttttttttttttttctgagctattctgttgctcaataaagctcctcttcaccttgctcaccctccacttgtccgtgtacctcattcttcttgggcgcaggacaagagcttgggacctgccgaatggcaggactggaagagctataacacaaacagggctgaaacacgccccttgcttgccgtgttgatggtaatgagaaggagagaagagctccagcccttcagaaagcctagacctgggagctccctgagccagggcagtgactccctctttgaggcccagcatgaagcttggagtctccaagcttctgggctccaccatggtccctggtggcagccatggacgctacttgtggtgcacctggccaagccgcagccttgcagagagccagtgcccatgccggcacctggagctgctcaccctgctgcagcagccggtgtgtctgactgtgcacaggggctagaccccatgcttgcttgaacacacaccccttgccactccacacctggcacacccttggcaggtgtgggatccaggctggtagcaagagccgagtgtagcctgccaggtcaagtgggcagaatgagcccagtgggcctgagcaaaactcaggcaaagatgccaccagccacagaggtttacagccagaaaagtgacaccatcccaagaattctgcaatggcaccactgcactccaggctgggtaatagagcaagaccttgtatctatgaaccctgaagacattatgctaagtgaaataagccagacacaaaaggacaaatcctgtgtgattccactcctctcctaggagtcaacagaggtccctcaagtcaacagattcatagaaacagaaaataggctggtggatgccaggagcaggggagggtgctggggagtgagtgtttcatggggacagtttcatgctgggaagatgagaaagttctggagatggatgaaagaaagtcaaatgctatacattctcacttataagtggtatctaaataatgtgtacacatgggtgtagagtgtagaatgatagacattgggtgggcggggggggtggatggaaggagagaaagtgatgaaaaattgtataacagatacaaagtatattattcaggtgatggatacacgaaaagccaagaccaccattatgcaatatatgcatgtgacaaactgtacttgtagcccttcaactttttagatttttttttttttttgagacggagtctcgctctgtcacccaggctggagtgcagtggcgcgatctcggctcactgcaagctccacctcccaggttcacgccattgtcttgcctcagcttcccgagtagctggaactacaggcgcccgccactacgcccagctaattttttgtatttttagtagagatggg[146 bp omitted]cgcaatcatagctcactgcagcctcaacctcccgggctcaagcaatcctcccacctcagcctccccagtagctgggaccacaggcatgtgccaccacatccagctaatttttaaaatttttttttgtagagatagggtctccctatgttgcccaggctggtcttgaactccaaagaaagtaacattttggatgttctggtcttgcttttggtccataacggaactgttactgttaatacgttaagtctctaccgccctctagtggttcactttatttgcaccccgggaacaacgttgagtgttccctttttattttgcctagtagacggtccagccctcttttgggtactttttggaattccttttggcctccaacctgtttcctgtaagctcccagtttgctgcctgccacaaaagtacacacacagccacctgttgcaatacacatacataagtatatatttttttgagatggagtctggctctgtcgcccagtctggagtgcagtggtgtgatctcggctcactgcaacctccgcctcctgggttcaagcgattctcctgcctcagcctcccgagtagctgggattacaggtgcccaccaccatgcccggctaaactttgtattcttagtagagatggggtttcaccatgttggccaggctggttttgcactcctaacctcaggtgatccgccaaccttgacctcccaaagtgtggtgaatacagttgtgagccactgtgcctgaccagtgattttcatttccctaacaacaatgatattgagcatcttcatgtgtgcctggagctgctattattattattattattattattattattattattattattttgacagagttttgctcttgtcacccaggctggaatgcagtggcgtgatctcagctcactgcaacctctgcctcctgggttcaagtgattctcctgcctcagcctcctgaatagctgggattacaagtgtgtgccaccacacccggctaattttttgtatttttagtggagacagggtttcaccatgttggccagactggtctcgaactcttgacctcaggtggtctgcccgctttgtcctcccaaagtgctgggattataggcataagcccactgcacccagcatttttttttttgagacagtttcactctgtcgtccagtttggagggcagtggtacaatctcagcttactgcaacctccgccaattgggttcaagcgattcttctgccctagtctcccgagtagctggaatcacaagtgtgtgacaccatgcccagctaattttttgtattttagtagagatggggtttcactatgttgcccaggctggtctcgaactccttatctcaggcaatctactcaccttggcctttcaaagtgctaggattacaagcgtgagccactgctccagcccttttttctttttcttttttttttttttttttcagacagggtctcactctgtcactcaggctggagtgcagtggtgtgatcatggctcactgcagcctcaacctccctggctcatgaagcgatcctcctgcctcagcctcccaagtagctaagaccacaggtgtacaccaccatgcttggctaattcttaatttgtttgtagagacaggttctcgctatgttgcccaggctggtctcaaaaaatcctctcacctcggtctcccaaaacactgggattacaggcatgagccaccaagcccagcctgtgcttggagcttttgagttcacttttaaacttggaaagaaggcagcctagccctcctggtggccgctcccacccatgaagccagccagagggacgaagagagcctggccctggtgacatcatttgaagcctggacccagccaggtctgcagcctggggctgaacttcaaaagtagatatgctggccaggcacagtggctcacgcctataatcccagcactttgggaggctgaggtgggcagatcacctgagctcaggagttccagatcagcctgggcaacatggttaaaccccacctctactaaaaatacaaaaattagctggcatgcttgcatgcacctgcagtcccagctacttaggaggctgaggcagaagaattgtttgaacccagaaggtagaggttgcagtgagccgagattgtgccactgcactccagcctgggtgacagagcaagactctgtctcaaataaacaaacaaaagtacatattgctgattgtccgtttgtgatttcagtcagttggggttgaatattttgtcctttttcaccaacagaccttcctgattaagcggatcacctgaggtcaggagttcaaaaccagcctggccaacatggtaaaaccctgtctctattaaaaatacaaaaattacccgggtatggtggtgggtgcctgtcatcccagctgcttcgggggctgaggcatgagaattgcttgaacccaggaggtggaggttgcagtgagccaagatcgcaccactgcactccagtctaggcaacagagatcctgtctcaaaaaaaaaaaaaagtatatatgctgattgtccatttgtgatttcaggcagttggggttgaatattttgtcctttgtcaccaagagaccttccctgatggagactagg[144 bp omitted]acctgtctctactaaaaatacaaaaaattagtcgggcgtggtggcgggcgcctgtagtcccagctacataggaggctgaggcaggagaatagcgtgaacccgggaggtggagcttgcagtgaaccgagatcacgccactgcactccagcctgggctacaaagtgagattgcgtctcaaaaaaaaaaaaaaaaaaagagttacagactggattgggaggccgaggtgggcagatcatgaggtcaggagttcgagaccaccctggccaatatggtgaaaccccgtctctactgaaaatacaaaaattagccaggcgtggtggcacgtgcctgtaatcccagctactcaggaggctgaggcacaagactcgcttgaaccgggaggcagaggttacccaggcctcttgctcatcggctacgttcatgccccaagaggaggctgtgaggaggggccagcaggagccagaggacagatactggggatagagcgggatttttttttaaatgattttgcactcgggccacataagctggcaaagaagaggaagagccacggggtcaggggaggaggcaggcgcttctctatcctcctccctcagaagattttgtttgttgattctttttttttttttttttgagacagagtcttgctctgttgcccaggctggagtgcagtggcgcaatcttggctcactgcaacctctgtctcccgggttcaagcagttttcctgcctcagcctcccgagtagctgggactacaggcacgtgccaccaagcctggctaatttttttttttttttgagacgcagtctcgctgtatcgcccaggctggagtgcagtggggtgatctcggctcactgcaagctctgcctcccaggttcacgccattcccctgcctcagcctcctgagtagctggaactacaggcgccggccaccatgcctgcctcattttttatatttttagtagagatggggtttcaccacgttagccaggatggtctccatctgctgacctcgagatctgcccacctcagcctcccaaggtgctgggattacaggcgtgagccactgtgctcagccaccctccccaagaagatttttaactgaggttctcaactctttgggtggtcaaacacctcttcaggggctgtcacggaatcacagctcctctcccccaaatacaccaagacacacaacattttgcagatgattttacaagtttacagacatcctcaaccccacctcttcctaccaccatgatccatcctggagccacaagtgaaaaacctctggcttctagaacaagaaaggaagaaggactcggaagcagatgaccaggaatccaagttcagtcccactactgtctcactgtagtgcaaagagctttggaaaaggacggactgggttcaagtccacgatgtgtggccttaggcaagtcacttgccctctctgagccacatctataaaatgagagtattctcatttatctaaagtgatgcactccaggcacctagattgtatgcccaaacacccatcttttgcacacaatgtcaagtggtctgtggacgctgaaacccatccagggaccccagataagaacctcttactatgtgtctaggctggaatgcagtggcacaacctccactttctggactcaagccatcctccacctcagcctcccaagtagctgggactacaggctcatgccaccacacccagctaattttttttaaatttttcatagagaggaggttttgctgtgttgctcatgctggtcttgaactcctgggctcaagcaatcctcccacctcagcctcccaaaatgttgggattacaggcatgagacactgagcctggccaaaagtctttgctgttgctccagcttgaaagctcattcccatcccaggggtttcacacagccattccctctgtccagaatggacttgccctggcttttggtatcgttggttccctcttgtcattaagggctcaactgcaaagtgcactccctggaccacccatgtgatagtgctgctcccagaaccatcatcttccagaatattattgtattttatcttttttagcgcctatcaatggctggaagtgctttgtgtgtgtgtgtttttatttgtttaatatctatatccttcattagggcaaggacgttgtatgtctttgttgtcttggatccccagaggctagcatctgatatatagcaggagcccaatatatgtatgtgtgttgaatgggtgaatgaatgagtagttgaaaagtagatgaatgaaaggatggttgaatgatttggatggataaatgaatggacaaacgaatggctaaatgtgggcgaatggatggatggatggatggatgtagggtaaggtgatggataaataattgggtaaattaatggataaatggcttaataggtggatgaatgaaaggataataaatgatggatgatgatgaataattgataatggatggatggatgaatggatagtttgatggatgattcaatggatggatagatacattaatgaatgaataggtggattaaaggatagataatagaagaaaggcggaatcgttggataaattactggatgggcaaattaaaggatgaatagatgatagttcaatggagagttcaatagatgaatggatggatggatggataaattagtggtggctggatgaatggataaagtattggatgggtgaattaacgggtggatggaaggatggagaaattaatgtgtggatgaattaaaagataggtagatggataaactaatgggtagataaattaaaggatgggtaggtggatggttagatggataaattaatggatggatgaatcaaaggatgggtggatgatgaatggatagaggaataaattaatgggtagatgaattaaagggtgggtggatgaatgaataaattaatggtagatgaatgaatgaatggatgaataaattatggggcagatgaattaaaggatgagtgggtggctggatgtttgtcaaactctatgctaaggacttcacacacattcatttgttttaaccacacaaaaacccccacaagacaaggaatattatttctgttttacagacaatgtccttgagcttctgaggcaggaaaaatcacttccccaagattgtacaactagaaaatggtggagcaggaattctaacttaggtctgcctgactccaggccccgtgctcttaaccaccatgaaaacagaccttccccaccactccaccactgctttagagactatcctggctaccctcgctcctctctcatgtccacatgcccccaaagcacccagactgcccagtctgggactctgctgttctcagctgtgaacctgaggacctcacaagtccgtgggaggagatgagtgggtctgcatgtaacatctccacatgcacatgtggatgtagaatgaggtgcctggaagtcatgttcattctctggggtgtcccccaagagccagggacattgccatggccagagacagatgagggagtctggtagtgaccaccaatatttagaagctaatatttatttatttatttattattttttgagatggagtctctctcttgttgcccaggctggagtgcaatggcatgatctcagctcactgcaacctctgcctcctgggttcaagcgattctcctgcctcagcctcccaagtagctgagattacaggcatgcaccaccacgcccggctaatttttgtatttttagtagaggcggggttttgccatgttggccaggctagtcttgaacttctgacctcaggtgatccacccacctcggcctcccaaagtgctgggattataggcgtgagccaccgttcccagcctagaagctaatatttagatgccacatccttcagtcaccccagtacctggtgacacagtcccaccagctcatgtgacaatggtcactgggaggctgtggacacagaggaggaaatgaaagaggatggggggggtcatggaggggagatgcacgagacagccccccacagtcaccaggctgctgctcagagatgtcacaaagtccatcatctgcctcaaggcagggcagcgcaggacaaggaggacacggaaggggaaacagaggaaggaaccacgagtgtcccgcaggtgcaagtcctgaccggggctatcttctcaagacacaggcaagttgttgggtggttggatagtcaagaggctggcaggtctcagcagtccttgtcatcaccccggatttccacgtagggcagccccacgggccaactgtcccgaggccagtagcggactttgagggtttcacctggcatctcatagttggcatccaccaaggccatggtgaccatgccataagggaaggtgatgctgatgagcacatgcctgtggagtgcagggcgaaggtggcgagggcacaagatacccacagcctcacgccggccctctttttacttctcatggctcttgaccatccatccaggggagccttctgggtctggccccgtgactgcagccttcccctaccgccaggtcccagtgtctggctctcctctctctgcttctccaaccccagcccccaggtgcctactccgagctttggcatctaagattctctgactctgggccccccacagcctcagagcatgtgcttaccagatgctgtgcagatagaagaaatgaatcctctgccagaagctgcaaagcagacggtcactgatccagctggtcagagcaacagcccataaaaccacggagacctcaatcaggtgccgaagctccttattgctggtcctagagaggggagagggggaccaggggctggctcggagagcagcacctgatggggctgatgggaaattcctccttccacagtgatgaggctcagaggttgggagaagggaaagagcaggaattgagggtgcaagcagagggggcccaatctcgtgcttagaactaacacagcatttccagcacaacaggtgcagttccaaatgtccttcaagccaggcatagtagctcatgcctgtaatcccagcactttgggaggctgaggttgggaggatcgcttgagccctggagtttaagaccagcctgggcaaaatagcaagaccccatctctaaaaaaaaaaaaaaaagttaaaattagccaggcatgatggtgcatgcctgcagttccggttactcgggaggctgaggcaagaggatcatttgagcccaggagtgcaaggctgcagtgagccgtgattgcgccgctgcactccggcctgggtgacagagtaagaccctgtcttaaaaaacaataataggccgggcgtgatggctcacacctgtaatcccagaagtctgggaggctgaggcaggtgaatcacttcaggccagaagtttgagaccagcttggccaacatggtgaaactctgactctactaaaaatacaaaaaaaaaattagccggccatggtggtggccgcctgtaatcccagctacttgggaggctgagccacttgaacccaagaggcggaggttgcaatgagccgggattgcgccactgcacgccagcctgggtgacagagtgagactccatcttaaataaataaataaataaataaaaacaagtaacaataata[136 bp omitted]actctgtctctactaaaaatacaaaaattagccgggcgtggtggcgtgtgtctgtaatttcagctactcaggaggctaaggcacaagagtcgcttgaacccaggaggtggagattgcagtgagccgggatcgcaccattgcactccagcctgggcgacaagagtgagactccgtctcaaaaaaaaaaaaaaaaaaaagatattaactcagtcctcacaaggactttgtagaggagtaaattgaggcacagggattgcactatgccccaccccaccccatggttacacagctggtaagtggcagagctgggatctaaaccaagtttttctgactgcatagtatttattcttaaccaacaagccctttggtgcttgtatgttttggggtagaggtatgtgtgcctcaagctctcaaagtgctgggattacaggcatgagccatcatgcccagcaagaataatatattttttgtaatcaggggagttaaattataaaaaaaaattaggggtgaaattgtatgaaatctgggagaaatatgtaacagattgacaaaatgtgggtggttgttgtggctggttagtgggcgtggggaggtttgtggggctattttctctgcttgcatgtctgtttctgggtttcatcataaaaaggacaaactctgctgggcacagtggctcacgcctgtaatctcaacactttgggaggccgaggtgggcagatcacctgaggtcaggagtttgagaccagcctggccaacatgacgaaactccgtctctactaaaaatacaaaaattagccgagcatggtggcatacacctgtactcccagctgctcgggaggctgaggcaggagaatccttgaacccgggaggcagagtttgcagtgagctgagattacaccactgcactccagcctggaagacagagagagactctgtctcaaaaataaataaataaataaataaaataaagataatgtagggtggatgcagtggctcacacctgtaatcccagcactttgggaggctgaggtgggtggatcgcttgagcccaggagttcaagaccagattgggcaacatgacgaaaccctgtttctacaaagaaaaatacaaaaattatcctggcatgatggcatacgcctctagtcccagctacttgggaggctggagtgggaggattgcttgagcctgggaggtggaggttgcagtgagccaagatcacgcccctgcactccagcctgggcaacagagcgaggatccgtctcaagaaaaaaaataataataaggacaaactctgcagtcagtcaggttcaaatcctggccctgctacttgttagtgggtgatcttggagaagggacgtcccctccgcgagcctggagtcaggggtgctaggagggggatgggagcctcctgcccaggcacctgcagccttcactcacttcctgtactcctggcacacgatgtagagaatgtgcagggcaatgctgttgagggcgtaggcgttgaccgtgggccgcaggaaggacagaagggtgctgaccacagtggtgatgaagaccaggcggatgaactgggacctggggaggaaggggctcagctgtaggcgggaagggaggtcctgggattgtaggcatggtcacttggagatcccgtggcccaggtgggtgagaaaaggacaggattctggggagcccagataggctcagaaaagggtcctagccaggcagggcacggtggctcatgtctgtaatcccagcaccttgggaggctgaggtgggcggatcacctgaggtcaggagtttga[133 bp omitted]ctcctgcctcagcctcccaagtagctgggactacaggcgcccgccaccacgcccggctcattttttatatttttactagagacggggtttcaccatgttagccaggatggtctcaatctcctgacctcgtgatccgcccgcctcggcctcccaaagtgctaggattaccggcatgagtcactgcgcctggccctggtgaaatcccatttctgctaaaaatacaaaatttagccaggtgtggtagcagatgcctgtaatcccagctactcaggaggctgaggcacgagaattgcttgaaccaggaggcagaggtttcagtgggccaagatcacgccacggcactccagcctgggtgacagagggagattctgtctcaaaaacgacaacaagaaaaagggtcctagcccggcacggtggctcgtgactgtaatcccagcaatttgggaggctgaggtgggaggattgcttgagctcaggagttcgagaccagcctgggcaacatggcaaaaccctgtctctaccaaaaatacaaaaaactagctggatgtggtggcatgtgcctgtaatctcagctactaaagaggctgaggcagggatcgcttgagcctgggaattggaggttgcagcaagctaagattgcgccactgcactccagcctgggggacacagcgagacttcatctaaaaaaaaaaaaaaaaagaagaaggagaaggagaagaagaaggtcctgaggctcccaagtggactcagcagaaagtctcagggagcccaggtgagcccaggcagcgtctaaagggggatcccagggaggactcagtaggatgagaagagggtcccagggagcctgggagagcgtgatggtttccagggcccaggtgaggtcaggcaaggagttcaggggatcccagctgggctgagaagagggatccctgggtccgggtgaatttaagagatgtcagacagtggctctccaggacccagtagggataaaggaaagatgacaggggtcccagaggtcaatagggtgggctgggggggtcctggagggctcaggtgggttaagccgggttagaagagaatttcacttgcctgtaatcccagcactttgggaggccaaggcaggtggatcacttgagatcaggagatcgagaccagcctggccaacatggtgaaaccgtctctactaaaaatacaaaaattagccgggtgtggtggcaggtgcctgtaatcccagctactcgggaggctgaggcaggaggatcacttgaaccctgaaggcagaggctgcagtgagccgagatcgcaccactgcactccagtgtgggtgacagagcgagactctgtctcaaaaaggaagaagaaggaggaggaggaggaggaagaaaaagaagaaggaggaggcggagaagaagaaggagaaggagaaggaggaggaggagaagaagaagaagaaggagaaggaggaggagaaggaggaggagaaggaggaggaggtggaaaagtagaaggagaaggagattatttcacaggggtcaagggtgggagtggggatcaattagatcaagagagggacccagggggtctaagcagatcagatgaaagatgccaggaacgccaggtgagaggctcggggaggagtccctcaggcccaggtaagtgtagacatgaggtcctggaactcctgttggctgcaacagattctggaggaagtcccaggttatcaaagtaggatcaagggagggattccaagaaaccaggtaagctcaggggaggggtctccagaagcccaagtgagtcaggcagggtcaggagaaaacccgaagtggtcaggggaggaattccaagggccccaaagagggtcaagggtggggacccaggggactcaggtgagctcatgtagagtcaactgaagactcagaccccaccctgtccagatggccagcccctgacccacctgttccccccaaggaaggaggggaaatagcagcggggcatccatatgctatagccactgcccaggagccacaggatggcgatctcgtccagcagctggcccaggaagctgagcgtcatgtggaaatacatggagaacaggcctgcagcggcaagggcaggcggtcagtggggtccgccacctcctaaacccccactgcctcccgactgtcacagacctgaaccacacctccctacctatgatcatgaagaggacccagacaacgtaaatgtagcgggagcgcttctgggcatacgggtgcatcaggagcatcatcagtggcccgaagatgaagaaggggatattggagaactggagcagagagagccatagggaggagctcgtcagataggggagacggaggaggctgccctctgtccagacactcagtcaccagccagtcggttacctgctgcatttcaggcaatgcatcaacccaggatttgtcaatcactcacctgtcaacctttcagccgaccctttttttttttttttttttagatggagtcttggagtcttgctctgtcactcaggctggagcgcagtggtgccatctcagctcactgcaacctccacctcccaggttcgagcgattctcctgtctcagactcccgagtagctgggattaaaggcacgtgccaccacgcccagctaattttttatatttttggtagagacagggtttcaccatgttggccaggctgctcttgaactcctgacctcaggtgatccgcccatcttggcctccccaaagtggtgggattacaggtgtgagccaccgcacctagccacttttcagctgatcttgaccatcagctggtcatccatagatcaatttctcgatccgttattggttcattcattcattcagtgagtgtggcaaagactatccactaaacttccatatatattctccttctcttttactttttctatttatttattttacagtcaggatcttgctgtctgctgccaggctggagtgcagtggtgggatcatggctcattgcagcctcaatcagctgagctcagaggatcctcctgcctcagcctcccgagtagctgggactacaggtgcccgccaccccacctggctaattttcttttattttttgtagagaaggggtctcactatgtcacccaggctggttgcaagctcccagcctcaagtgatcctcccaccatagcctaaagtgttgaaattacaggtatgaaccactgcacccagccccttttcctgtaaaaatagtatctcccaagtttgaactgggcacacagcttacccagtgaaagactacatttcccagccttcgctgcagttcactgtggccttgtggccttttgacctgctctggccaatgagataagaatgtaaatgacatctactacttccaggtcagtcctttcaaaaaccacgtaaggaaagcttgccccctttcctcttcctgtgggctgaaatgtggccatggatgtcatgagttgaccttgcccttgcagacaaggaaagacgatgcagtacctttttgacaaacagcatgaagcagaaatgatactgtgtgacttctgaggttaggtcataaaaggaactgtggcttccacctttctctatctcataggacaagacgtccagatcctaggccaccacacaagaagactggctacccttgaagccaccacgctggagaaaccatgtgtagagaccacactgagatggagagagatgccagaggagggccagtggttcaattcttccctat[137 bp omitted]catagtgaaactctacaaaacagtatgtaaatatatattgtgaatatatatatatatataatatgtgaatatatatttcacaataatgtaaaacaatacaaaaattggccaggtgcagtggatcacacctgtaatcctagcactttgggaggctgaggcaggcagatcacttgaggtcaggagtttgaaaccagccagggcaacatggtgaaatcccatctctactaaaatacaaaaaaatagctgggtgtagtggtgggtgcctgtaatcccagctacttgggaggctgaggtgggagaattgcttaaactcaggaggcagaggtggtagtgagccgagatcacgccatcgcactccagcctgggcaacagactaagacttcacctcaaaaaaaaaaaaaaaaggtcacaagaacatttgcacccaaaattaaatgactcaagaccccgacgtgctgacatcagactttgactccccacaaagtgtctccctgatatgtctgagccgcgacaagtctctcatatgacaaatacttatataatatgggtggaaatgtaaatgggtacaacctctacggaaaacagtatgcagaattttcaaagaactaaaattaggactaccatttgatccagcaatcccgctactgagtatctacccaaaggaaacgaaatcattatactaaaatatacctgcgttcatatgtttattgcagcactgttcacacaggtgaagatatgaaatcaacccaatgattggataaagaagatgtggtatatatacacaatggaat[137 bp omitted]gcctcctgagtagctgggactgcaggtgcctgccaccacgcccagctaattatttttttgtagtttt[135 bp omitted]tttatttattgagacagggtctctctctgttgccgaggctggaatgcagtgacacgatcatgggtcactgcagcttcgacatcccaggttcaagtaatcctcccacctcagccctccaagtagctgggactacaagcatgcaccaccatgtccagctaatttttgttttgttttgttttgttttttgagacagagtctcactccgtcgcccaggctggagtacagtggcgcgatctcggctcactgcaagctccgcctcccgggttcatgccattctcctgactcagcctccccagcagctgggactacaggtgcacgccgccacacctggctaattttttgtatttttagtagaggcggagtttcaccgtgttagtcaggatggtctcgatctcctgatcctgtgatccaccctcctcggcttcccaaagtgctgggattacaggcttgagccaccacggccagcctaatttttgtattttttgtacagatgggatttggccatgtggcccaggctggtctctaactccaggactcaagcaatccacccgccttggcctcccaaactgctgggattacaggcatgagccaccacacctggcctggaatactatttagccattaaaaaaagaatgagcccaggtgtggtgactcacacctgtaatctcagcacttggggaggttgagacaggcaaatcacgaagtcaggaattcgagaccagcctggccaacatggtgaaaccccatctctacaaaaaatacaagaattagccaggcatggtggtgtgtgcctgtgagtccagctactcgggaggctgaggcaggagaatcacttgaatctgggagacagaggttgcagtgagctgagattgttgcactgcactccagcctgggtgagagaacgagactccgtctcaaaaaaagaaaaaagaatgaaataggccaggtgtgatggttcatgcctgtgattccagcaatttgggaggctgaggcaggagaattgcctgaggacaagagttcgcaaccagcctgggcaacatagtgagaccccacctccataaaaaataaatttagaaaattagccaaacatactggcatgtgcctgtagtcttaactacttgagaggctgaggaggaaagattgcttgagcacaggagttggaggctgcaggagctgtgattgtgccacttcactccaacctgggtgacagagtgaaaccctgtctcacacacacacacaaagaatgaaatgcctttgcggcaacatggatggaaccggaggacatgatcttaagtgaaacaactcagaaacagaaaatcaaatatcgggccgggcgcggtggcttgcacctgtaatcccagcactttgggaggtggaggtgagtggatcatgagaccaagagttcgagaccagcctggccaacatggtgaaaccttgcctctactaaagatacaaaaaattagccgagcatggtggtgcatgcctataatcccagctactccagaggctgagacaggacaatcgcttgaatccaggaggcagaggttgcaatgagccgagatcgcaccactgcacaccagtctgggcgacagagcgagactccctctcaaaaaaaaaaaaaaaagaggtcagacttcaccaccacacaatacatacatgtaacaaaactgcacttgtacttcttcaatttatacaaacaaaagaaaaacatgaaactgtcacatgagctcagaaacaagtctctttccctccccatctttttttttttttttttttttctgagatggagtctcactctgtcacccaggctggagtgcagtggtgcaatctcggttcactgcaacctccgcatcctgggttcaagcgattctcctgcctca[221 bp omitted]aggtgtggaaagaaaaacaagtgattgatatgaaatggacaatgtcagtaaacagattacgactacagttctggactgcaagcgcttctcttcagtggtccaaggacagatgggacaggggccatgccaacgcctccatgcgcctcttctcagcccgtggccctagttcagttgcctccatttgtgctgatgcacacatactcccaaacaaacacaatgttccctctgcctccaaccaaacaccagcccttgaatatcaacgcgtgcctgaagatactgacccaaccagtctcccagattcaaaagcatccattaaaacgtgtctgggccttcaataaataaagtctaaactcttaaacttggcgtataaattccttccataactcatctctctccaactttttttgttgttgttttgttttttgtttgttagttttgtttttgtgttttttttctttttgagacagagtcttgctctatcacccaggctggaatccagtggggcaatcttggctcactgcaacctccaccgcccgggttcaagcaattctcctgcctcagcctcccgagtagcagggattacaggcactcaccaccatgtatgtctaatttttgtatttttagtagaggcagggtttcatcatattgcccaggctggtctcgaactcctgaacaaagcagatccactcacctcagcctctaaaaatctccatttaaaacatgttcaggctgggcgcggtg[236 bp omitted]agaaaccccatctctactaaaaatacaaaattagccaggtgcggtggcgcatgcctgtaatcccagctactcaggaggctgaggtaggagaatcgcttgaacctgggaggcagaggttgcagtgagctgagatcacacgattgcattccagcctgggtgacatagtgagactctgtccccccaaaataaataaaaaataaaaaataggccaggcacagtggctcatgcctgtaattccagcactttggaaagctcaggcaggcggatcatgaggtcacgagatcgagaccatcctggctaacacagtgaaacaccgtctctactaaaaatacaaaaaaaaaaaaaaaatagctgggtgtggtggcaggcgcctgtagtcccagctacttgggaggctgaggcagaagaatggcgtgaacccgggaggcggaggttgcagtgagctgagatcgtgccactgcactccagcctgcgcaacagagcaagactccgtttcaaaaaaaataaataaataaataaaaataaaattattcctaactcatctctctccaactcaaaaagaaaaagaaaaaaaaaagaaaacaaagatggaaagactagacgggtggtggtgattaagagggtgctcccctgctgcctggccctgtgactaatgcctcttggtttctcttcgcttgtatcagtaaaagcaggacacatcatcaatggtaccttgcaggctgatgcgggccatgcacaagatgaggcattgcagaagtgcattgcccaggatgtggtatgagctcaaaaaatagctggggctgctgctgttgttattgttgaaggagataataataataacaggcctgttatgggtatcgttattccaagcttaggggccagcagagtccagccaggagttatcaacagtgtccctaagcgctcagaaggaggacagagactgtgggtggagatactgactaatgggggaccccgactaatggagtttccgataacatcggaaactgcctggatgccagggtctccctccctgccttccggggctcagcccccacgttccctgcttctcatcccacccaggctctgccaggcgggggagacacctgtctgggatcccatccaaagccagcccagtcctgaactctggacacaagtgagctggaccttcttggtcccagctccagcaggtgacatcacctccctcccttccttcattcattcgttcattcattcattcattcatttgtccaagcatcccttgagtacctactatgtgctcaaggaccataccagtgtctgaaaacaaagtccctgccttctcggggtgtatacagtcaggacagcaggggacctcctgtgcctggttttcctgctcctacttccagaggctgctgtgaggattacagagttaagtgccacgggaccagggagctctgtgtgttttgccccctccccaccctgtatctagaacactctctggcacacagtaggcgcctaatacattttagtagaaaagaatacacataaataatacagaaggggccaggcgcagtggctcatgtctgtaatcccagcactttggaaggctgaggtgggcagatcacttgaggtcaggagttcaagaccagcctggccgacatggagaaaccctgtctttactaaaaatacaaaattagccggtgtggtggtggatgcctgtagtgccagctactcaggaggctgaaacaggagaatcgcttgaacgtggaggctgcagtgagctgagatcgcaccattgcactccaacccctgtgacagagagagattctgtctcaaaaaaaaaaaaaaaaaaggaaagaaagaaaagtttgttgaatacatctccaacatctcctcattcttcgtcctcattgccaaagctcaaactccctcccaccagcaacacctggcctctgtctccagttgaggacagccacctgcattcattccaagtgtgcctgctaatgttggagggacgaagtgtgcaccggccacagcacaagacttaattgcatgaattaaaatgcgtatatctcactctgtcacccaggctggagtgtagcggcgcgatctcggctcactgcaacctctgcctcccaggttcaagcaattctcctgcctcagcctcctgagtagctgggactacaggtgtgtgccaccacacctggctaatttttgtatttttagtagagacggggtttcgctatattggccatgctggtctgaaactcctgacctcaggttatccgcctgcctcagcctcccaaagtgctgggattacaggtgtgagccgctgtgccatccaaaatgcacacaattaattcctaatcaccagtaattaagtggtctcacagcaccatggttaagggagagattctaggaccaggctctttaagaagctgcaacttttgtgcaattgtaatttgcatactgtgtggccctaggaaagaaatataccctctctgagccttgatttccccatctgtaaaatggggagcataattgtacctacttcataggattttatgaggattacagttggtgctaattattcaatgaaatgaataaatacctaataaaattaatgaatgtcactttgacatctctgggtgctgtattcactcgtaataagaatagctacaatgtattcagtgcttaggatgtgccaagagctgtgggttgtttttttttttttaacatccctatttttaaaatcaagacataaatcacatactataaaattcactcttttaaactatgcaattcagtgggtttcagtatattcataaggcatgcaaccatcacactagctaattccagaaaattttctttctttttttttttttgagaccaagtctcactctgtcgcccaggctggagtgcagtggcatgatcttggctcactgcaacctccgcctcttgggttcaagcgattctcctgcctcagccacctgagtagctgggattacaggagcccatcaccatgcttgtctatttatttatttgtatttttagtagagatggggctttgccatcttggcaagactagtcttgaactcctggcctcaactgatccacctgtctcagcctcccaaagtgctgggattacaggtgtgagccaccccatctggccgaaatacattctttaaaaaaagagagtgaatgcatgagtttttcttccttggcacatcccaccgcctggcatcttgtagccttgactttggcttattttcttcttctccatccccagaacatcagccccaccagggcaaggagtttcttgtatttttttctttgtttgttttgttttgttttgtttgagacagagtctcactctgttgcccaggctggggttcagtgcgcaatctcagctcactgcaacctccgccttctgggttcaagcgattcttctgcctcagcctcccaagtagctgggactacagacacgtgccaccacatctggttaatttttaaaattatttttagtagagacggggtttcaccatgttggccaggctggtctcgaactcctgacctcaggtcatctgcccaccacggcctcccaaagtactgggatgacaggtatgagccactgcacccggccggcagggagttttggtgcttggatcactgctgtgtcctcagagcctggagcagagcctggtgctcctgcaattcttgttgaataaagaagaaattgttgtcccaacaactcaaacccctccatcagccccaggatgcttgcagggaagggtcaccaacacctgttttcttcaaaggagaaaggaggtccagaggaacctatcttgcctgggagtatcatgggctagatcactggtttcatgcatgtaattatccaacttacggcatctgccttccctgggtcaacaagatttatatacaaattcatccctaagtcatttgtaattgcaataaaaaatgaataaataaaatagaaactgtaacactgtcacccaggtgcgtggggctgaatacattctagtgaaatattatgcagctatttaaaaggatgcttttgatctaaagatgtaaatgaaagacaaaatatgtagcagaaatatgtagcagctcctatttgacttccaggactcgagcacatcttcttcttctcttctgctgtctttccccaaactcctaccccacttggcaaactcctattcatctttcaaaacccaaccctgggtgcccttttccatgaagcctcccaacacctgggctgactcctcgggtgttttcttctcctgtagccacaaccatgagtgtctgggctctgcaacctcaaccccagactcagctccttgcaaacagagcaacaagaaagcaaaagattcttctttggagaatgatatgatttggctgtgtccccacccaaatgtcatcttaaattgtaactcccacaattcccgtgtgattgaattatcggggtgggtctgtcctgctctgttctcctaatagcgaatgagtctcatgagatctcatggttttaaaaacaggagtttcagccgggcgtggtggctaatgcctgtaatcccagcactttgggagaacaaggtgggtggatcacctgaggtcgggagttcaagaacagcctgaccaacatggagaaaccccatctctactgaaaatacaaaaaattagccaggtgtggtggtgcacacctgtaagcccagctactcaggaggctgagggaggagaatagcttgaaccagggaggcagaggtttcggtgaacggagatcacgccattgcactccagcctgggcaacaagagtgaaactctgtctcaaaacaaacaaacaaaaaacaaaacaggcagggcgcagtggttcacacctgtaatcccagcactttgggaggccaaggcaggcagatcacgaagtcaggagatagagaccatcatggctaacacagtgaaaccccatctctactaaaaatacaaaaaattagctgggcgaggtggcgggtgcctgtagtcccagctacttgggaggctgaggcaggagaatggtgtgaaccctagggggcagagcctgcagtgagcagagatcacgccactgcactccagcctgggtgacagcgagactccgtctcaaaaaaaaaaaagaaaaaaagaaaaaaaaatgggagtttccctgcacaagctctttctctttgcctgctgccatccacgtaagatgtgacttgctcctccttgccttccaccatgattgtgaggcctccccagccacgtggaactgtaagtccattaaacttctttcttttgtaaattgcctagtctctttttcttcttttgcaaactgcccagacataaaggtaagtctttattagcagagtgaaaatgaactaatacagagaagtattttcctgccctcccatcttgcttttggtagggcctggcacaccagaggcgtccagtaattaattgtttttgctgtggatattgataagaaggacagcagaagagggaggcatgagtggatctcacatccatacttgtaatttagagcttatgagacctgccattgtgtgtagctcagagaggggcaggtctcctcctgggtcacacagcattcaggggagagctgggactggaatcccactgcagaagccagcctcaaggagactcaggagaggaggtgaggagagtgttggagatggcagcactgcagactatctcccctccacccccttccgactctgatctcctcatttctctctttttatttttattttttgagaccaagtctcgctgtgtcacccaggctggagtgcagtggtgtgatctcagctcactgcaatctccacctcccagcttcaagcgattctcctgcctcaccctcctaagtagctgggattataggtgtgagccaccacgcctggctatttttgtattttttgtagagatggggtttcaccatgttggccaggctggtctggaactgctgacctcaagtgatctccctgccttggcctcccacagtgctgggattacaggcatgagccaccgcacttggcctctttttaatttttttttagacacagggtctcactctgttgcccaggctggagtgcagtgaagtgatcataactcactgcctccaggacctgggggaccttg[136 bp omitted]accccatctctactaaaaaaaaaaaaatacaaaattaaccgggcgtggtggcacgtgcctgtaattccagctacttgggaggctgaggcaggagaatttcttgaacccgggaggcagagattgcactgttgcactttagtctgggcaacaagagcgaaactccatctcaaaacaaaataaaataaagaaagaaagagaaagagagagaagagagaagaaagaaagagaaagaaggagagaaggaaaggaaggaaggaaggaaggaaagagagagagagaaaggaaggaaggaaggaaggaaggaaggaaggaaggaaggaaggaaggaaggaggaaggaaggaaactctcctaagttgtcatcaacccagaagaaggctgcacctggaggccaccaggccaatgcaagcaggagcaaactgacggagcccacacctggacctcttccccttccctactcgagccgcccctcccacactgctgacttctgttcctgttggatgacccttcctggctctctctgcccatctgccaaatgccaccggttgccccagctgaccccacatcatgactctcctctgttcaaaagccaccccatggctccccagggctctcaggacagagcacacagtcctcagcctgacattcccaatttggcccctgaaaacctttccagtcctttctctcacccttcagtctctcccccatcgactggggagactccccctgggctccgcttcaagctgctcactatttcctgccaggctgtgctgttccacctcaagaccttggccgggtgcagtggctcacgcctgttatcccagcactttgggaggctgaggtgggtggatcacttgaggtcaggagttcaagaccaggctgaccaacaaagtgaaaccctgtctctattaaaaatacaaaaaattagccagccatggtggcaggtgctataatcccagctacttgggaggctgaggcaggagaatcacttgaacctgggaggcagaggttgcagtgagccaagatcgtgccactgcactacagcctgggtgacaaagccagactccgcctcaaaacaagaacaacaacaaagacctttacatatgctattccctttgcctccaaacccttgagctgggcgtggtggctcatgcctgtaatcccagctactctgggggctgagacgggaggactgctggagcccaggagttcaaggctgcagtgagctatgatcacaccgctgtactccaggcagggcaacagagcaagaccctgtcactaaaacaaacaaacaaaattcaaagccttagaggacatctactcattctttttagatttggtttccatggtattgtttgtttttcattgttgtttttgtttttgttttattttgaggcagggtctggttttgtccctcaggctggagtgaagtggtgtgatcatagctcactgcagccttgaactcctgggctcaagcgattcttctgcctcagcctccggagtagctgggaccacaagtgtgcaccaccatgctcagctattttttttttttttttttttttaaagacggagtctcgctctgtagcccaggctggagtgcagtggcaccatctcggctcactgcaagctccgcctcctgggttcacccgccactctcctgcctcagcctcccgagtagctgggaccacaggcgcccaccacaatgcccggctaatttttatatttttagtagagacggggtttcaccgtgttagccaggatggtctcgatctcctgaccttgtgatccgccggcctcggcctcccaaggtgttgggattacaggcgtgagccactgcgcccggcctattttttttttaatcttttgtagtgatggggtcttgctatattgcccaggctggtctgaaactcctgagctcaagtgatcctcctgcctcggcctcctaaagtgctggggttacaggtgtaagccaccacacttgccccccagagcattgttgatgttctttccccattcagcaagcagagaccttatgccccattcctctgacaccccgtttctggcacccccttcctctctccgcctcaagctaaccatggggctgaagaaatctgtttctaattctgggtctcttacaacctggggacaccgagcctcctccctggaatcccaggatcatccagcagcggtgggtttatagcattttgattgaataaatgaatgagtccatcagtgaacacaggatacgtttccaacattctaaccaagcatgcgaaccgttacgtcttcatctctccccacattgtagctacaggaacatactttctcctttctcaatctgaccagctcttctttgacttccagaactgagcacatctttccctgctctcctgctatccttccccacttggcaaactcctattcatctttcaaaacccaactcctacatgtccttttctatgaagtctccaaacacctggggtgagttcttgggtgtttcctgtttctgtaaccctgaccatgagctgctgggctctgcatgctcccaaacagagcagcaagaaagcaggctgggtgcagtggctcatgcctataatgccagcacttttagagattgaggcaggcagatcgcctgaggtcaggagtttgagagcaacctggatgacctggtgaaaccctgtctctgcaaaaaatacaaaaattagctggggatggtggtgcacacctataatcccagcactttgggaggct[134 bp omitted]gaggcaggagaatggtgtgaacccgggaggcggagcttgcagtgagccgagatcaggccactgcactccagcctgggcggcagagcgagactccgtctcaaaataaataaataaataaataataataaaataaaaataaaataaaataaaataaaataaataaacactctttggcctgtgggcaaagttcagcccactgccttgtatcatgtgtcccacaagctaagaatcatgtttacattttcaaatgattgaaaaattaaaagattattttgtgacatgtgaaaattatatgaaat[132 bp omitted]aaaccccatctctactaaaaataacaaaaaatagctgggcatggtggtgctcatctataatcccagctactcgggaggttgagacaggagaattgcttgaacctgggaggcagaggttgtggtgagccaagattgcaccactgcactccagcctgggcgacagagtgagactccatctcaaaaaaaaaaaaaaattattggcatacagccacacccatttatttatctattatctatggctggttttcagctacagtggcatagttgcgtagttgagacagagtctggatggcccagaaagccaaaaatattggccaggcgtggtggctcatggctgtaatcccagtactttgggaggccaaggagggtggatcacctgaggtcaggagttcaagaccagcctgagcaacaaggtgaaaccccatctctactaaaaatacaaaaattagccgggagtggtggcaggtgcctgtagtcccagctacttgggaggctgagacaggaaaattgcttgaaccagggaggtggaggttgcagtgagccaagatcgagattgtaccagtgcactccagcctgggcaacagactgagactccatctcaaaaaaaaaaaaaaaaaaaaaaaaagtcaaaaatatttactagctagccctgtacagaaaaggttggccctgggtgcagtggcttatgtctgtaatcctatcactttgggaagtgaaggcacaaggattacttgagcccagcctggcagcatagcaagaccccatctctatacaaaacaatgtttttttagacagagtctcactctttcgcacaggctggagtgcagtggcaccatctccactcactgcaacctccacctcccaggttcaagcaattctcctgcctcagtcttccaagtagctggaactacggatgcatgccaccatgcctggctaatttttttttttttgtaattttgatagagatggggtttcatcgtgttttccaggctggtcttgaactcctgagcgcaagtgattggcccacctcggccttccaaagtgctgggattacatgtgtgagccactgtgcccagcacccatctgtataaaaatttaaaaattagctgtgtttggtggcatgctcttgtggttccagctactttgaaggctggggcaggaggatcacttaagtccaggaggtcaaggctgcagtgagctatgatggcaccactccatcccaggctgggcaatagagtgagactgtgtctctaaaacaggtaaaataaaaataaaataaaataaacacgaaaagaaaaaatttgccacccactccacccttttgaactgtatgatttattagctatgggtttgggatactcagaagcgttttggaggagaaggtcttggggaagccctttctcacataactctgattctattcctcatcccctgacctgtttggagagaggctttttgatatagaatagaatagaatagaatagaatagaatagaatagaatagaatagaatagatccaggtgtgtttgtaccagggaagggtaagtctcgttttgtgcaacttttgtttctgtatgatacacatctggaaaggcaggtacaggatgatgatgatgtaaaatttctttcataataggtgttctgatcagaggagtttgacaactgcagccttacccggtagctacaggtggctcaatttattttatctggggacaggctacagcagaatccagtggaggacaattttgcctgagataagaacacacagctatactcaggctcaggacacacttgaatcagccctttctaggtgctttttattttttagagacaggatattactctgttgcccaggccggaatacggtggtgcagtaacaggttactgcagcttcaaactcctgaactcaagcaatcctcctgccttagcctaccagctagtttttatttttattttatttttaattttttaatttttaatttttttttttttgagatggagtcttgctctgtcacccaggttggagtgcagtggcgtgatctcagctcactgcaagttccacctaccgggttcacataattctcctgcctcagcctcccgagtagctgggaccacaggcgcccgccaccacgcccagctaatttttttgtatttttagcagagacggg[146 bp omitted]aggctggagtgcaatggcgtgatctcggctcactgcaacctccacctcccagattcaagtgattgtcgtgcctcagcctccccagtagcagggattataggcatgcgccaccatgcccagctaatttttgtatttttagtagagatggggtttc[133 bp omitted]actgggtcttgctatgttgcttaggctggtcttgaacttctggcctcaagtgatcctcctgtctcgaccttccaaagtactaggattaaaggtgagagccaccatacccagcctctcagtgccttctgcaagggctctcatctgggtgcaggatgaaaacagaacactggaccacagtggctgctggggattccagagagaagagctctagagcccttacccatcatctcagcctcgtaggaccaatcattcagctccctcccatgttagaggtgggactactgaggaccgggaaccatatctctggctaaggaagagcaagaatcagtgagaccgtgaggatcctggagtctcataatcccacttcccaggtatgggaagccccggggtgaaaggcaacagggtcagagcaacctgagcctcggactctcctcccagaaaagtctcctggactcaccaagtttaaatcctggctctaataaccagggtgaccctgggcacagccttcaaactccttgaacacctgttttatcacctggaaaatgggatgaagtctgtatcatatagattgcatctaactccccatgtcactgtgcagattaaaggaggtgtttcacgtaaaatgtttagggtcatgcctggtacacagcaagcactttttttttttttttgagatgaggtctcgctctgtcaccaggctggagtgcagtgacacaatcttggctcactgcaacctctgcctcccgggttcaagtgattctcctgccttagcctcctgagtagctgggactacaggcgcccggcaccatgcctggctaattttttgtatttttagcacagacggcattt[262 bp omitted]catggtgaaaccctgtctctactaaaaatacaaaaattagccaggcgtggtggtgggaacctgttatcccaactactcgggaagctgaggcagcagaatggcttgaacgcgggaggcagaggttgcagtgagccgagatcgcgccattacattccagcctaggtgacaaagcgagactccgtttcaaaacaaacaaacaaacaaacaaaagaactaagcactatgcctggatcccatcattcccagggctccaggcaaacacctctgtgttcccagcacccagtatgggcatggcatagctgcactgatctttggctttaagctttggctaaatgccgtgatcatttgtgcattcctatttttttttttttttttgagacgaagtctcgctcttgtccctcaggctggagtgcaatggtgcgatctcggctcattgaaacctccgcctcctgggttcaagccattctcttgcctcagcctcccaagcagctgggattacaggtgcctgccaccaaacctggctaatttttgtatttttagtagagatggggtttcaccatgttggccaggctggtctcgaactcctgacctcaggtgatccactcaccttggcctcgcaaagtgctgtgattacaggcgtgagcctccgcgcccggccttttttttttttttttttttttgagacagggtctccctctgtcacccaggctggagtgcagtggtatgacctcagctcactgcatcctccacttcttgggttcaagaaatcctcccccctcagcctcccaagtagctggaactacaagcacacaccaccacacccagctaatttttaaaaactttttgtagagacagggtcttgctatgttgcccaggctggtctggaactcctgggctcaagcgatcttcctgcctctgcgttccaaattgctggggttacaggcatgagccatggtgctaggtacatccatgattttttagcacttcccatgtggtgttttaacagggaaagagaagaccacctcagaatgtccagaactgaggagtttctcaggaggtgggactttttttcttctttttttgagacagtctcgctttttcacccaggctggagtgcagtggcacaatctcagctcactgcaacctccgcctcctgggttcaagcgattctcatgccgtagcctcctgagtagcttggactacagatgcctgacaccgtacccagctaattttttattttagtagagatgggctttcaccacgttgcccagggcgatctccaactcctgagctcaggcaatccacccaccttggccttccaaagtgctaggattacagacgtgagccaccgcgcccagccaagaggtgaaactttttaaatactgaaaccaggatagtcccaggcacactgggacaagttggtcagtgggtacagctgcaaacaagacagacacaatcacctcttccaggaagcctttcctgattggcccaccccctctagctcaggggcaccctctgcctccccctaccacagctgcctctgtgccctccaagaaggcaccatcgctcccggttgcaaatgcctgcagtcacatcagagttagcttagggaaggcagagaccggttcttttcctggccaccaatgtgtctccaaaacctaccacagagcttggcatcaagtaaagacaagtaaatgaatgaaagctggcactctttggctaacagatgagaaaactagggctgagacaggtgaaccactccagcaagattccccagtaaggctgtatggggaggaaccgggattcgaaccggcatctggcgagactccttcacacacccacgcactcaccgtgttgtagaactcggccaccagctccgagtactggaagttgctctcacaccagtccacctcggagctctgataggcgaagatgctaggcatcttgtctcagtggccaccaccagccggctgcgcccggcagagagaaggcgagcttgggaaggctgggccctgatgaggcggggagaggacagcccggtgccccgcggcaggcagactgggaggaaaaacctgctgggccgctccccagttgcaccagggcagcctggctgtgcagtgacagcagccctgagcataagccgtgggactggcactgtccaggcagggcagggggcagaagtaggcagggaagaggcctcccatccagattacccaggaataggaatcggggtgggggcagtggagggaactgtttttatcttttatgtatgtatgtatttatttattagagtcagggccttgctctgttgctcaggctggggtacagtggcatcatcatagctcaccgcagcctcaaactcccaggctcaagcaatactcctgcctcagcctctgaagtagccaggaccacaggcacatgctgccaccatgcctagctaattgtttttttttttggagacagagtcgctctgttgcccaggctggagtgcagtggcatgatctcagctcactgcaagctctgcctcccgtgttcacgccattctcccgcctcagcctcccgagtagctgggactacaggcgcccaccgc[141 bp omitted]gcccggcctttttttttaaaattgagatgcagtctggctctgtcacccaggctggagtgtagtggcgcaatgtcagctcactgcaacctccacctcctgggttcaagcgattctcctacctcagcctcccaagtagctgggatgactggcacctgccaccatgcccagctaattttttttgtattttagtagagataggatttcaccatgttggtcaagctggtctcgaactcctgacctcaggtgatctgcccaccttggcctcccaaggtgccgggattatacgcatgagccacctcacctggcctgagttcctctactttaagctgtgtgaccttgggcaagtgaatttacctctctgatcctctgtttgctcacctgtcatatggagacgatggtgacagagccaactgtaacaaaggaagacagagataaagcatgtacaaaggcttagcccactgcctatgctagagtaggcacttgatggatggtaatgggttttctttttttttttgagatggagtcttgctctgtcccaaagtgctgggattacagggttttcttactgaagctgaccttgaactttaagtcaactttgtgggaataataataattattattattataataaaagagcctggccttagcaagcggttagcaagtgtgcataacaataataatataattatttattatataatagcaatattatattaaaatataaaattattatattaaaaatactattgttatataatattttaaatattttagtatattattttaatgtgattaatataatttaatataataattaatattatatattatataatttttctttttttaagtgcttgattttcagtattatctcatttaacgttcttttttttttttttttttgagatggagcctcactctgtctcccaggctggagtgcagtggcatgatcttggctcactgcaacctccacctccctagttcaagcaattctcctgcctc[220 bp omitted]ggctcacgcctgtaatcctagtgctttgggagaccaaggcgggaggatcacaaggtcaggagattgagaccatcctggctaacacagtgaaaccccatttctactaaaaatacaaaaaaggtagctgggcgtgatggtgggtgcccatagtcccagctactcaggaggctgaggcaggagaatggcatgaacccaggagacggagcttgcagcgagccaaaattgcaccactgcactccagcctgggtgacagagaaagactctgtctaaaaaaaaaagaaaaaatcctaagcgccaggaactattgttatcccttttctttttcttttttttctttttcttttctttttttttttgaaatagagtttcactcttgtcacccaggctggagtgcaatggcatgatctcagctcactgcaacctctgcctcccaggttccagcgattcccctgcctc[134 bp omitted]cggcttcccaaagtgctgggattacaggcttgagccactgtgcctggcctctttttctcttttgagacagggtcttgctctgttgcccaagctggagtgcagtggcgcaatcatagttcaatgcagccttgcttgatctcctgagctcatgcgatcctatctcctgctagtaatcactagcaaggaaactaaagcccagagaagttaaggaacttaccataggtcacacagttaggaagtgatagagacaggcaaggaacaccacctctatgatgcctcagtttcctcacctgtaaggtggtgaaaatgataatggtactgccctctcaagcctgttgtgaagagttagtgagctgacacgatgtttccataaaaagataaattgtgggctgggcacggtggctcatgcctgtaatcccagcactttaggaagccaaggcaggcggatcacgaggtcaggagatcaagaccatcctggttaacatggtgaaaccccgtctctactaaaaatataaaaacctagccaggcatggtggcgggcgcctgtagtcccagctacttgggaggctgaggcaggaaaatcgcttgaacctgggaggtggaggtagtagtgagccgagatcacgccactgcacttcagcccgggcgacagatcgagaccccgactcaaaaaaaaaaaaaaaaaagaaaaagaaagataaattgtggtgctatgttgccctgcattccaaatcactgaactggccgggcatggtggctcacccctgtaatcccagcactctgggaggctg[134 bp omitted]gaggcaggagaatagcttgaacccagaaaacggaggttgcagtgagccgagattgcaccactgcactccagcctgggcgacagggtgagactccctctcaaaaaaaaaaaaaaaatcactgtggtgtctgaaagtaatcaactttttcaatttccaatatttggagaagagaggctcagtcagtgctaatatgttctatgtctcttaacacttaatgactttgacaaaaaagaaaagaaaagcccttcattaggcaacaatattctgttagaatttagtaacatgatttgtttacattgtatttattttttgataagcttgtattcatggtaagccaaatctactttccattcacggtagggttacaaagtttcctttttttttctttttttttttgagatggcgtttgctctgtcccccaggctggagtgcaatggcatgatctcggctcactgcaacctccacctcccaggttcaaacgattctcttgcctgagccttctgagtagctgggattacaggcgtggaccaccctgcctggccaaagttttctttttctttttcttttcttttctttctttctttcttttttttttttttttttttttttttttttttgagatggagtcttgctctgtcgcccaggctggagtgcagtggctcgatcttggctcactgcaagctccgcctcctgggttcatgccattctcctgcctcagcctcccgagtagctgggactgcaggcacccaccaccaacgcctggctaatttttttgtatttttagtagggacagggtttcaccatgttagccaggatggtctcgatctcccgacctcgtgatccacccacctcggcctcccaaagtgctgggactacaggcgtgagccaccgcgcccagccccagaattttctttttaaaataatattttggcccagtgcagtggcttacacctctaattccaccgctgcactctaacctgggcaaaaagagggaaaccctgtctcaaaaaaaaatagttaattaaataaaataaaaataaaataataaaataaatatgtattttttaagagatggagtcttgctccgtttcctaggctggagggcagtggtaaaatcctagctcacagcaatgtcaatttcctgggctcaagcaatcttctcaccttcgcctcccaagttgctgggagtacaggtatgagctactgtgccctggccaaaataaatgtaagtgttacaattgtggttgtgtttgcacagatctatacatgtgatattattgcatagatttgctcccatttttctgagaaaatgaaaagaaaattgtctaacacatgaatgcatgggaaaagctgttgaaatctgaatatggtctataggtcatatttatatcacctttctggttgtgaaaatgtatagttataaaagaggtaccactgggagaaactggatgaagattacctgggattcttctatattattattgcaggttcctgcaagtttataattattccattttttttaatgtgtttgatagagggtctcactctgctgccaggcttgagtgcagtggtgcaatcacaggccactgcagcctcaacctcctgggctcaagtgatcctcacaccttagcctcccaagtagctgggactacaggccaggcaaattttttctattttttgtagagacaggttctcactatgtctcccagactgctctctaattcccgagctcaagcgatccttccacctcagcctcccaaagtgctagaattacatgtgtgagccaccgcacctggccttaaaatctttttttttttttaagaccgagtctcttcctgtcatccaggctagagtgcaatggtgcaatctcggctcactgcaacctccgcctcctgggttcaaatgattctcctgcttcagcctcccgatagctgggattacaggcgcccaccaccacgtcgggctaatttttacatttttagtagagatggggtttcagcatgttagccaggctggtttggaactcctgacctcaggtgatccgcctgcctcagcctcccaaagtgctgagattacaggcatgagccaccgcacccagcctaaaaatctctttttataaagggattgatttagatttttaattaatacatgaatggataaacacaatgtgtgtggttcatccataccgtggaatattattcagccctgaaaaaggaaggaaattctgatacaggcaacaacgtggatggactttgaggacatcaagctgggtgaaataagccagacataaaaggacaaatcctgtgtgatcccactcctaggaggtccccaaagtcctcagagtcacagagacaggaagtagaacggggggtatgaggggctggggagggggatagggagtgagtgtttcttggggacagagtttcagtttggaaagatgagaaagttctggaggggatggtggtgatggctgcatagacatgcgaatgtgcttaatgccgctgaactatgcatttgatgattaaaatgatcagtttcgtgttatgtatcttttaccacaattttacaaagtaatgatttagggtttttgtttttgttttttgttttttgagatggagtctctctctgttgcccaggctggagtgcagtggtgcgatctcggctcactgcaagctccgcctcccgggttcacgccattctcctg[136 bp omitted]agcctcctaaagtgctgggattacaggcgtgagccaccacgcctggcctgatttaggtttttaaaagaggggtttggggctgggcgtggtggctcacacatgtaatcccagcattttgggagactgaggcaggtggatcacttgaggtcagggttcaagaccagcctggccaacatggtgagacaccgtctctactaaaaataaaaaaaataaaattagccaggcgtggtggtgcgtgcctgtaatcccagctactcgggaggctgaggtacgagaatcacttgagcctgggaggtggaggttgtagtcagccaagatcgcgccactacactccagcctgggcatagagcaagactctgtctccaaaaaaagaaagaaggaaggaaggaaggaaggaaggaaggaaggaaggaaggaaggaaggaaggaaggaaggaaggaaggaaggaaggaaggaagaaaaacagaactaaagcttgacctgactctgtatagcacccctccacaaacatacaccatttagctacagccctagcccccaaatccgcttcccaggtggaccaggagggcaaacagacaccaccactgccaccccagctccccagtagcgaccctgactccttccccatggagtaattttgaaacagtctctgctctgtgtgtgggtggagcagatggtctctgaggcccctttctgctcatagctggaacaggacccagctgctgagatcctgaatcttggcgagggtttaatagcaggcagtaaggtagtgactggcacccacgcccagcccagaccggagaacttgagtgatcatggtgctgactagggaggacagagcagccaggaaggtgggtgggagccgggggagagctcttcccccgctagggggagagaaggggctagagagagggtgacaaacagaggcgtgtgagctctcagcggttattgtaacaaatgccaccaatgtaatggcttagaacagcacacacttatcatcttacctttctacaggtcaggactctgaaatgagtcttataggctaaaggtgtcatcacagctgtgttcctggtggaggctccaggagagacctcgtttcctgccccgtccagtgtctagaggcaacccatgtcctgttctccaccttcacagccacagtgcagcctcttccagtctctctctgactttgttcttttcttttgagacggagtcttgctctgttgcccaggctggagtgcactggcgcgatctcggctcactgtaacctccacctccagggttcaagcaattcttgtggcaggagaatcgcttgaacccaggaggtggaggttgcagtgagccaagatttcgccactgcaaaccagcctgggcaacagagcgagactccatctcaaaaaaaacaacaacaaaaaaccagtctaggcaacataggggaccctgtttctacaaaacattaaaaagttagccagtgggggtacacacgtgtggtcttaacttctcaggaagctgagatgggaagattgcttgagcctaaaggtcgaagttgcagtgagctatgtgtgcaccactgcactccaacctgggccacagagcaagaccttgtctcaaaaaaaaaaaaaagaaaaaaaaagaaaaagaaaaagaaaaaaggaactatacccatcttagcattgggcttttttttgttttcttttgttttgttttgttttgtttttctttttgttttgagatggagtcttgctctgtcacctaggctggagtacaatggtgcagcagcctccactcaccacaacctctgactactgggttcaagcgattctcctaccccagcctcccaaatagctgggattacaggcacccgccaccatgcccggctaattttttttatttttagtagagacgcgggtttcaccaggttggccaggctggtcttgaactcctgacctcataatctgcctgccttggcctcccaaagtgctaggattacaggcgtgagccactgcacccagcagtgttggttttaatacttgctttctatttatttagtagctttccatgtagtggagcaatataaaatttccttttgaagtaaagatatgcattaatatttggaaagtgtttttggaaaatgaacttgtttaaagacagtgtttaagtcaataatggttaccgtacagatggggaaaattttagtctaacaatgcccaaagtcacaaaggacattattgggtaattggtgaaatttgcacatggaatataaagtagataatagtattgtgtccatatttattttctgaagtagataaatgaattctggttgtgtaagagagtatcctagttctttttttttttttttttttttaagatggagtttcactctgttgcccaggctggagtgcagtggcttgatcttggctcactgcaatttctgtttgagttcgagaccagcctgggcaacataggcagactgtgtctctaaaaaaaaataataataatccattttaaaaacaaactatttcagaccgggagtggtggctcacacctgtaatcccagcactttgggaggc[135 bp omitted]gaggcaggagaatggcgtgaacccaggaggtggagcttgcagtgagccaagatcgtgccactgcactccagtctgagcaacagagcaagactcaatctcaaaaaaataaataaataaatacaataaaataaaaacaaactatttcaagataaaaagttgtgggtttgtttgttttgagacggagttttgctcttgttgcccaggctggagtccaatggcatgatctcggctcactgcaacctccacctcccgagatcaagtgattctcctgcctcatcctcccgaatagctgggattacaggcacccgccactgtgcccggctaattttgtatctttagtagagacagggtttctccat[133 bp omitted]tggtgaggatgggaagtgggggagtggtggaaatatgaagaggccaaccactttggaaaataatttgacattacctgaagcattactgggtacagtagttcaactgttagaacaagacaattccacaaatatcagtgtcctaaaagtttacatctcacataagcaaagagtatggagggtgaagctgtcccagaaggctcaggcaagtgggaatttagcaatccaggccccttccttccttctcatgatgcctccatcccagcatgtggcctccatcccaacacgtgacctccatctcaacatgtggcctccactcccaatatgtggcctccactttcaacatgtggcctccatacccatcaagtggcatccatctcaacgtggggcctccactcacaaaatgtgggcttcctcccaacttgtggctctaaatcccaaaatgtgccctttgctcccaacatgtggcctccatacccatcatgtggcccccacctcaacatgtggcctccactaacaaaatgtgggcttcctcccaacttgtggctctcaatcccaacatggctttggtgtacctctattggtcagaactagtcacatgacctccactagatgaaagggttgctgggaaatgtaatctgtagcacagcagccacttcctggtatccactttaccctgtgggaagggagcctgaatctttaaaccacaacaggctgcctccatcacattcagtaaaggtgcaaatgaacatgtcctacaaccagcaactcatctcctggatttatgtccccctgagaaactcccacaaatggacccaggattctggtacaagattattcagagcagccctgcctgcaatagcaaaaccatggaactattcacaaacatccctgagttaaagacttgataagtaggccgggcatggcagctcatgcctgtaatcccaggagctcaagacaggtggatcacctgatgtcaggagttcgagaccagcctagtcaacatagtaaaaccctgtctctactaaaaatacaaaatattagccaggcgacgggaggctgagg[139 bp omitted]gcacctttaattccagctactcaggaggctgaggcatgagaagcgcttgaacccaggaggcagaggttgcagtgagccaagattgtgccattgcactccatcttgggcaacaagagcaaaactccatctcaataaataaataaatttatttatttattaaataaagactcgttaagtaaatagtggattctcctgcctcagcctccctagtagctcggactacaggcacccacaaccatacctggctaatttattgtatttttagtagagacaaggtttcaccatgttggccaggctggtcctgaactcctgacctcaagtgatccgcctgcctcagcctcctaaagtgctgggattacaagcgtgagccaccgcacctggcctgtgtgggtataagttttcaatgcatctaggtaaatacaagggggcacaattgttggattattttgttgtttttttctttaaaccatatatgtatgttatatatcctcttgtgaagatatatttcacaacaatcaatttattttattttattttattttattttatttatttatttgtttatttttttgagatggagtctcgttctgtcatccaggctggagtgcagtggcacgatctcggctcactgcaacctccgcctcccgggttcacaccattctcctgcctc[253 bp omitted]tattggcacacggtcacacccatttgtttgtaagttgtctatggctacttttatgctataatgcagcaatctgcaagctttttgtcacccaggaccagttttgtgcaagacaattttatcacggaggtgtggaatggtttcaggatgattcaagcacattacatttattgttcactatttctattagtattacactgtaatatataatgaactaattatacagctcacataatgtagaatcagggaaagccctccccttgttttcctgaaactagactgtcccagctgggggtgatgggagacagtgacagatcatcaggtattagattctttttttttttttttttcaaatggagtctcactctgtcacccaggctggagtgcagtggtacgatctcagctcactgaaatctcggcctcctgggttcaagcgattctcttgcctcagcctcctgagtcgctgggattacaggcgcgcacgaccatgcccagctaatttttgtattttttgtaaagacagggttttaccatgttgcccagactggtctccaactcctgacctcagatgatccacctgccttggcctcccaaagtgctgggatgacaggcatgagccaccatgcctggcatcatccagctaattttattataataataataataattattattattggaaatggggtctccctatattgcccaggctgctttcaaacacccaggctcaagtgatcctcccacctcagcctcccaagctgctgggattccaggcgtgagccactgtgcctgaccatcacatcatcttccaaggtgggttaattccatgacttactagaagaagggttgccagataaaatacaggacacccagttaaatcagaatttcagattaacgatggataagtttttggcataaatatgttccaaatattgcatatgatcggattatcctaaaaattattcttcatgtatctgaaattcaaatttaaatgagcctcctgtatttttatgtgctaaatctggagactctaatctggaagtatctcttcaactgagcctgtctcattccttcctccaaaaaaaagttcgagaaaagttttcattaagtggcattatgtcatttctactgcctcctctacctaaatccaataacctcaaatgggtattctaaggttattggttattaaccttttatttcactcattcttttctcctcctcctcctcctccccctcctcttcctcctccttcttcttctccttcttcttcttcttttttttcttttctttttttttttttttgagacagggtcttgctctgtcacccaggctggagtgcagtgctgcaatcatagctcactgcagcctcaatctcctggctggagcaatcatcacaccttggcctcccaaaatgctaggataatcctggggcctctctccttggcttctagatggctgtccaccagccatctacatctggtggtcagccaccacccccagccgctgttttccatcagtccattctaaggttcaaaggtttaaaatctgtccatctagctcagaactcagatgtattttcttcaacatcacagcggagattactctggtccagcggggaggaggttctctgcccacccccttctttccttccttcttgaaggctgagaccgaggagggaaaaaaggaaagataaagagggatcttactgttatggcttgaattgtattctctaaaaagatgtgttgcagacagggcatggtgactcacatctataatctccgcactttgggaggccaaggagggagtatcgcttgaggtcaggagtttgagaccaccctggccaacaccacgagtccctgtctctacaaaaaaaaaaaatatatatatatatatatatataaaataataataaaagataagttacagaccccctcgtccctcagaatgtgaccttgcttggaaatagtctctttttcttttcttttctttttcttttttttttttttgagacagaatctcactttgtcatccagactggagtacagtggtgcaatcatagctcactgcagcctcaacctcctgggttcaagccatcctcccacctcagcctcgttagtggtgacgacaggtgtgcaccaccacactcagctaatgtttctgaattttttgtagagatgaggtttcgccatgttacccaagctggccttgaactcttgggcttaggtgatctgcccaccatggcctcccaaagtgctgggattataggtacgagccactgtgtggaaacagggtctttagaaaggtaatggagttaaaatgatggccgggcgtggtggttcacgcctgttatcccagcactttgggaggccgaagtgggtggattacctggcgtcaggagttcaagaccagcctgaccaacatggcaaaagcctgtctctactaaaaatacaaaaattagccgggcgtggtggcaggtgcctgtaattccggctactcgggaggctgaggcaggagaatcgcttgaacccaggaggtggaggctgcagtgagtccagatcatgccattgcactccagcccggaaaagaagagcaaatctaaacaacaacaacaacaaataagttattagggcaggtccttgtcctccatgactagtgtccttataaaaagggaaaatggctaggcacagtggctcatgcctgtaatcccagcacgttgggaggccaaggtggggggcggatcacctgaggttgggagtttgagaccagcctggcctcccaacgtgctgggattgcaggcttgagccacagtgcctgactagaagtgttaattttgaggagtgagacatctaggtgggtaagacaaagctgggaggcatccaggtacctacacacgtatttaaagccatgcagctggatgacatt[142 bp omitted]tctactaaaaatacaaaaattagctgggtgtggtggcacgcgcctgtaatctcagctactctggaggctgagacaggagaattgcttgaacccgggaagtggaggttgcagtgagccaagatctcacgactgcactccagcctgggtggtagagtgagactccatctggaaaaaaaaaaaaaaaaaaagaagattaaagactgagccctggggctctctaagacagaagggtctcttaaaggaccaatctgatgagagggaaaaaatctttcgtcacaaagaaaacatccatttacaggagactagttaactaaattatgggttttgatatcgacatggaatgctccacaggcattaaaaaaaaagatgacaaaagctctgagtcaccatttggattctccagaacagatcctgagaaataatttggggtgtgagatttttattgggaa[143 bp omitted]ctactaaaaatacaaaaattagctgggtatggtggcgggtgcctgtagtcccagctactccagaggctgaggcagaaaaattgcttgaacccaggaggcgcgggttgcagtgagctgagatagcaccactgcactccagcctgggcaacagagcgagactccatcaagaagaagaaggagaagaagaaggaggaggaggaagaaagaagaagaggaagaagaggaggaggaggaggaagaggaagaagaagaagaaagaaagaaggaagaaggaagaagaagaagaaggaggaggaggaggaggagagctaggcttggtggctcatgtctgtaatcccagcgctttgagaagcagaggcaggtggatggcttgagcctagagtttgagatcagcctgggcaacatagggagcccccatctctacaaaataaaagaaagaaagagagagagagaaagaagaaaggaaaagagggagggacagaaggagggagggaaggaaggagggagggagggagagaaggaaggaaagaaggaaggaaggaaagaaggaagggaggaaagaaggaaggaaggaaggaaagaaggaaggaaggagggagggaaggaaggaaggaaggaaagaaggaaggaaggaaaggaagggagggaggaagggcagacagaactgggcaaagggagaagttaaagtggtattgagcatggacaaagccttggctaatcggcgagggactctggagccagtgagccccatcagagcatcccacatgaagtcagaatacccaggcctttattcctctgcctcacccagtcactggctgtgggctgccctgggacagatgagactctgagggaggtggctctctgcacctgaaggtgatcctaaacatggaagctggaggtttctgctcaccatacatcccttggctgggcagtaagtcccttcttaaaaggggatctgggggctgggcatggtggttggcgcctgtaatcccaatactttgggaagccgagatggaacaatcacttgaccccaggagttcaagaccagctcaggcaacatagcaagacctcgtctctaccaaaaatacaaaaagtagcccagtgcggtggtgcatgcctgtggtcccagctattctggaggctaaggcaggaggatcgcttgagtccaggagtttgaggctgcagtgagccatgactgcactaccgcactccagcctgggtgacaaagtgagaccctgccctgtgtcaaaagaaaaaggaaagaagggaagggaaggagaggggaggggagggaagggtccgggcgtggtggctcatgcctgtaatcccagcactttgggaggctgaggcaggtggatcacaaggtcaagagatcgagaccatcctggccaacatggtgaaaccccgtctcaactaaaaatataaaaaattagctggcaccaacatggcacatgtatacatatgtaacaaacctgcacgttgtgcacatgtaccctaaaacttaaagtataataataataaaattaaaaaaaattagctgggcatggtggcgcatgcctgtaatcccaggtactcgggaggctgaggcaggagaatcacttgaacctgggaggcggaggttgcagtgagccgagatcgtgccgctgcactccagcctgggtgacagagcaagactccgtctcaagaaaaaagaaagaagagaaaagaaaggaaggaaggagggagggagggagggaaggagggagggagagagggagggaggcagggagggaaggatggaaggaaggaaggaaggagaagaaaaaagaggatgtgggtgctgcagaaggaacactccatgaaagcgggggttgttctctgttttctttgcatttgtttgctttcttttataggaacaaaaacaacaggagctgtaccccaatgctgtgtacatagtaaatgctcagtaaatatcaatggaataaataaacaaatttcctggctcctcggcagccaggtgtggccatgtgagcagatctgagccaatagagaatttgtgtgtcagaatcaccctaccaactctggatgccaacctccagactgtgactgggagagaaagtcatgtctatcttgtcagtcattggtatttctctccctcacagtcatacctaactatataattaaaccagtgaaggcactcaataaatatgagttataggccgggtgtggtggctcacgcctgtaatctcagcactttgggaggctgaggcgggcggatcacgaggtcaagagatcgagaccatcctggccaacatgatgaagccccgtctctactaaaaatacaaaaaattagccgggcctggtggcgggcacctgttgtcccagctacgcaggagtctgaggcaggagaatcacttgaacctgggaggtgggggttgcagtgagccgagattgcgccattgcattccagcctgggcaaaaagagtgaaactccgtctcaaaaaataaaaataataataataataaataaataagagttacaatccataatatggatacttgataatttggcttaaaatttggccaggcgtggtggctcatgcctgtaatcccagcactttgagaggctgaggcaggaggatcgtttgagatcaggagtttgagttctgcctggacaacatagcaagacccggcccttaccaaaaaaaaaaaagaaattagccaggtgtattgtatgcacatgtggtcccagctactcaggaggctgacgcaggaagatcgcttgagcctgggaggtcaagactgcagtgagctgtgattgcgctactgcactccagcctgggtgacagagtgagatgctgtctccaaaaattaaat[144 bp omitted]tactaaacataccaaaaattagccgggcttggtggtgggcgcctgtcgtcccagctactcgggaggctgaggcaggagaatggcgtgaacctgggtggcggagcttgcagtgagccgagatcacaccactgcactccagcctgggcgacagggcaagactccatctcaaaaaaaaaaaaaaaaaattcaagccatttaagtagtcccctcttacaaggcatttatttgcaattctttgctaacgtggccatgagagactatctccagagacagccgccatcactttccatcctgttatgcccctgccactcctccgccgagtctatttcatctcctcttccccttgaatttgggttgggctatgtgacttgctctgaccaatggaatgtggcagaagagctaccatgtgacttccaagccaagcatttaagaagacaagtagcttttgctaactctctctgaagtcagttgccatatggggaataaagaccaccataccatgagggagcccaaacagccatgtggagagagagatgactcactggggctccagatatgtgagtggagaatgttccacttgtggatattccagccccagaaaatcctagctgagcccagtgcagattctcaaattatgagaaatgataagctgtggttgtttcaaactcctaagtttaggggcggtttgttacacagcactaactaactgaaacacaggtgtatgaacaactctgccataagctactttggggtcaaatcttagtgcacaggtgcacacctttgatcatttcctaaaaacaaataactggaagtgggttctgtgaatttgaaatttggtgtcaactttgttcccagagaagctgtagcaatgtccatgagccattcattggtgcatccagcatttcatccacagcctcttcagcactgagagtttccttttcttttcctaattttcaatttctatcatttcaataggcccatttgcattcattccagagaaggtaacagtgatgacagcttctctctgatcatggagtgataaccaaaaaccagtagggcaggttgatttggagccaagagccaaaatactcattcattcagaacttactgagcaaggtttggaggaatgaaaacaacacattaaatatttatggagtcctggtgtggtggctcacatctgtaatcccagcaccaagaggccgaggcaggtgtgaggatcatttgaggccatgagttcaacaccagcttggacaacataagagaaattctgtctctataaaaacagaaacaaaaattagctgggcgtggtggcttgcgcctatagtctcagctgcttggcaagctaaggtgggaggattgcttgaacccaggaggtcaaggctgcagtgagccatgttcacaccactgtactctagtctgagtgacaaggcaagactctacttcaaaaaaaaaaggagacaaactcaccttcaactctttccctctgttgacatctcagcgctttgggaggccaaggtaagagggttgcttgactccaggaatttgaaaccagcctggacagcatagtgagactctgcctctacaaaataaaaataaataaataaagttgtttttcttctatttcagatcactatccactttaagtcgtggttcttggctgggcatggtggctcacacctgtaatcccagcactttgggaggcagaggcaggtggatcacctgaggtcaggagttcaagaccagcttgaccaacatgctgaaaccccatctctactaaaaatacaaaattagcctggcgtggtggcacgtgcatgtaatcccagctacttgggaggctgaggcaggagaattgcttgaacctgcaagggagaggtggcagtgagctcagatcacaccattgcactccggcctaggcaacaagagcgaaaccccatctcataaaataaaataaatacaataaaataataaaataaaataaaataaataaaataaaataaaacagtggttctcaggccagctgtgatggctcacacctgtaatctcagcactttgggaggccgaggtgggcaaatcacctgaggtcaggagtttgagaccagcctggccaacacggtggaaccccatctctactaaaaatacaaaaattagccaggcatggtggttcatgcctgtagtcccagctactcaggagtttgaggcaggagaatcacttgaacccaggaggtggaggctgcagtgagccaagatcacaccactgcaccccagcctggacaacagagcaagagaccatctcaaaaataaaataaaataaaataaaataaataagtaaataaataaataaatagtgattctcagctgggagcgactctgccccctggaggatacttggcaatgtctgagatactttttactgttaggggggcattttttttaattgatgggggtaggggtgggggtgctcctgttatcgagtgggtggaggccagagatgctgctcagcaccctacagtggcctgggtggccttttgtactttcaaagaattctccaactcagattttcaatcgtgccaaagttgaaaaaccctactttaagtgaaatgcaatagaacaggatcaaatagaatagaaaatatcaaaggacattgctcaaataataagtttcattttataagacttttgtatttttgtgtactcagacactatgtaagat[137 bp omitted]atatcgataccttgtctctacaacaaaaactttaaaaacaggagaagtgtcactccctctccctctccctctcccccctctccctttccccacggtctccctctccctctctttccacggtctcccactgatgccgagccgaagctggactgtactgctgccatctcggctcactgcagcctccctgcctgattctcctgcctcagcctgccgagtgcctgtgattgcaggcgcgcgccaccacgcctgactggttttcgtatttttttggtggagacggggtttcgctgtgttggccgggctggtctccagctcctaagtgcgagtgatccgccagcctcggcctccagaggtgccgggattgcagacggagtctggttcactcagtgctcaatggtgcccaggctggagtgcagtggcgtgatctcggcttgctacaacctccacctcccagccgcctgccttggcctcccaaagtgccgagattgcagcctctgcccggccgccaccctgtctgggaagtgaggagcgtctctgcctggccgcccatcgtctgggacgtgaggagcccctctgcctggctacccagtctggaaagtgaggagcgtctctgcctggccaccaccccatctaggaagtgaggagcgcctcttcccggccgcgaccccatctgggaggtgaggagcgtctctgcccagccgccccgtctgagaagtgaggagaccctccgcctggcaaccgccccatatgagaagtgaggagcccctctgcccagcagccaccccgtctgggaaatgaggagcgtctctgcccgacagccaccccacccgggagggaggtgggggtcagccccgccaggccagccgccccgtccgggagggaggtggggggggtcagccccccgcccggccagccgccccgtccgggaggtgaggggcgcctctgcccggccacccctactgggaagtgaggagcccctctgcccggccagccgccccgtccaggagggaggtgggggggtcagccccccacccggccagccgccccgtccgggagggaggtggggggttcagccccccgcccggccagccgctccatccgggagggaggtgggggggtcagccccccgcccggccagccgcctcggtccgggaggtgaggggcgcctctgcccggccacccctactgggaagtgaggagcccctctgcccagccaccaccccgtctgggaggtgtacccaatagctcattgagaacgggccatgatgacaatggcggtttggtggaatagaaaggggggaaaggcggggaaaggattgagaaatcggatggttgccatgtctgtgtagaaagaggtagacacgggagacttttcattttgttctgtactaagaaaaattcttctgccttgggatcctgttgatcggtgaccttacccccaaccctgtgctctctgaaacatgtgctgtgtccactcagggttaaatggattaagggcggtgcaagatgtgctttgttaaacagatgcttgaaggcagcatgctggttaagagtcatcaccactccctaatctcaagtacccagggacacaaacactgcggaaggccgcagggtcctctgcctaggaaaaccagagacccttgttcacttgtttatctgctgaccctccctccactattgtcctatgaccctgccaaatccccctctgcgagaaacacccaagaatgatcaataaaaaaataaataaaataaataaataaataaatagactggacaccctactacccatacccagtttaagatacagattacaaccaacaccgttaaagcccttttgcatgcccttctccatcccagccccctcctaaattttgtttataatgatctcgcttttcttcataattttacctccaaaatatgcatctgtaaacaatatgctgtttttgcaagcttttgaacattatataaaataaatcatactgcatgtaaaaaaaaaaaaaaactttaaaaacattagcaggtcctgttggcgtgtgcctgtggtcccagctacttggtagactgaggttgggaggattcacctgagtccagaagtatgaggctgcagtgagctatgcaccagagccaaacaagatagcagaatgttctgcagacaatagaaaaagaaacaaatgaattaatgcaattgtttatgatgaaagtcacaccaagatgaaaattaaacaaggcaaatgttctagagtgcctgggatattagcaaaggtgttcagggaaggcttctct[132 bp omitted]tctcctgcctcagtctctcccaagtagctgggactacaggcgcaggccaccatgcctggctaatttttgtatttttagttgagacggggtttcaccacgttggtcaggctggtcttgaactcctgacctcaggtgagccgcccgcctccgcctcccaaagtactgggattacggccgtgagccactctgcctggcttgactccaagcagagtaaagcagaggctttgtggctggattgagcttgatgtgtttggggtgtgaaaagcagaccagggtagggaaggagataaggggggtcagcaggggggacggggaaccgcagttcaatttaggtttctcagccaagcgcggtggttcacacctgtaatctgaggactttgggaggctgacgcacatggatcatttgaggtcaggagttcgagaccagcctggccaacatggtgaaaccccatctctactaaaaatacaaaacttatctgggcgtgatggtgggtgccagctactcaggaggtcgaggcccgagaatcgcttgaaccggagaggcagaggcttcagtgagccgagatcgcttcactgcactccagcctggatgacagagtgagaccccgtctcaaaaaaaaaaaaaaattagcttttttggggatctcttagagtgaagaatagtgaagaagagacagtaggtcacagtgacgtgggtgatactggagcacctgttagggagctattaacaatgaagaaggtgaaaagcagttgcaatggggagaagtgaagctgattaaacaaagggagacagggaacacatctaagaggaccccgccatcccacgtcagaggcagggcaggcagggggtgcagggcagcgtccggaggagtgaaggagtggaggagtggaggagtggctgcagggatggtggcagctgttgtcctggcccttctccccagggcgggggcaggagctgcagccctggggcaaccggccgggcagggccacccacctgactcacagcagaaactgggacagcagctgccctcctacctcctcaatcccagctggaaataaaagtaagattccagacctctggccaacaccctctgagcccaaatgccggctttccaccgtgaggccctgcctgccagcgctggctgccatgtgggctttctgctttgcggacctgcaaggtattctcctaactctgtcaccttcaactccctccctctgtcttactcctgattctacaaaactgggagtgtctgtgtccccttctatctccccatcggactgcagtcccctcgaggttacagagggcacaaaattattcttatctagggtacccagcatcaagtttaagagtccagtgtcccagctacttgggaggccgaggcag[214 bp omitted]catggagaaaccccgtctctacttaaaatacaaaattagctgggcgtggtggtgggcgcctgtaatcccagctactcgggaggctaaggcagaagaattgcttgaacctgggaggcggaggttgtggtgagccgagattgtgccattgcactccagcctgggcaacaagagcaaaactctgtctcaaaaaaaaaaaaaaaaagagtccagctgggcatgatggttcatgtctcagcagtttggaaggctgaggcaggaggatcacttaagtccaggagttcaagaccagcctgggcaacatagggagaccctgtctctacaaaaaattttaaaattagccagatgtggtgacatgcacctctagtcctagctacttgggaggctgaggtgagaggatagcttgagcccagaggttcaaggctgcagtgagctctgatcacaccactgtgctccagcctgggtgacagagcgagacactgactcaaaacaaaaaaagagtctaccgcttactgcttggtaaacttcttatacatcaaaatccacttcaggagtctctctgaatctgctgtgattttttttttttttttgagatagagttttgctcttgttgcccaggctggagtacagtggtgtgatctcggctctctgcaacctctgcctcctgggttcaagtgattctcctgactcagcctcccaagtagctgggattacaggcattcaccaccatgccgagataattttgtatttttaatagagacggagtttcactgtgttggtcaggctggtctcaaacccctgtccttaggtgatccacatgtcttgggctcccaaagtgctgggattgcaggcatgagccaccacaacacctcgcctgaatctgctgtgattcgaaggactgccccgggaaaaaaaagaaaaaaacacttcaagtagactcccatgtgggaggacctgaagacttctcagacttccatggtccctgatctaacacagcaataaatcattcaaactgagcactttttacacatttttggaccctttctgaggactttctgcacaaacctaggaggtaggttatcattatccccactctgcagatgcctccaaagccctctacctacctcctttatcacctcttcatctcttggttcaatgtgtatttaatgagcacctactgtgtgtcaggcactattctagactttggggatgaagcagtgggcacctcttagatagtgacattgaactgaatgatgaaaaagaatctggcttgagaaggtgtggcaaaaaagagaagtcccaacattaccagcaatcttcctacttccaccattttgcccattctttttcctctgctggaaatgcctttccccagctaacaaactcctacttatcctgcaaagcccaattccaatacctgcttctcctaggaatgctttccggtctgatctccaggaagaatccacaacacccttctctgggctcccacaatctactccacaggtggccaaaaaatgaatgaggaggtctcagtagaagtcggccacaccaggctggaagctcttcaaggccaagacccaggctaagtcctctctgggacccctcttccaagatgagctgtgggaacactgcagcttttttttttttttttgagacggtgtctggctctgtcgcccaggctggagtgcagaggcgccatctcagctcactgcaagctccacctcccaggttcacaccattttcctgcctcagtctcctgagtagctgggactacaggtgcccgtcacctcgcccggctaattttttgtatttttagtagagacgcggtttcaccgtgttagccaggatggtttcgatctcctgacctcgtgatccgcccacctcagcctcccaaagtgctaagattacaggcgtgagccactgtgcccggccctgcagctatttttaaaataaggaataagtggggtgtggtggctcatgcctgtagtcccagcactttgggaggcaaaggtgggaggatcacttgaggccaggagtttgagaccagcctgggcgacatagtaagaccccatctctaatacatatatatatatatttgccagatgtggtagcacacaactgtagtcccagctactctggagagcaaggtgggagggagggttgcttgggcccagaaatttgaggccacattgagctaggatggcgccactgcactccagcctgggccacagagtgagattctgtctcaaaaaaataaaaataaataaagcagaaacagtagaaaacgaagacgaggccgggcgcggtggctcacgcctgtaatcccagtactttgggaggccgaggtgggaagatcacgaggtcaggagttcaagaccagcctggccaaggtgaaacccatctctactaaaaataacaaaattaaccgggtgcagtggtgtgcatctgtaatcccagctactggggcagctgagccaggagaatggcttgaacccagaaggcagaggttgcagtgacccaacatcgtgccaccgcactccagcctgggtgacagagcaagactccgtctcaaaaaaaaaaaaaaaagaagacgaattggtcggtaaggggactcgaactggagactctaaaacttctccagccctgcccactcaatttacttcattggctcctccctttcaggctccgtccctatccccgcctcacccttaatggcgcccgcccagactcctggaagtgagcggcctagcgagcgagctcccaggcgcaaagcacgccggaagctgtagttccgccatcggacggaagccgaccggggcgtgcggagggatgtggcccggaatattggtagggggggcccgggtggcgtcatgcaggtaccccgcgctggggcctcgcctcgccgctcactttccagcgcagcggccgccgcagcggacactccagaacggcctggccctgcagcggtgcctgcacgcgacggcgacccgggctctcccgctcattcccatcgtggtggagcagacggtacggcggccgggcggggacacggttcgggggctccgggctgggtggggatcggctggctgccccggcccctcacctccatctttctacccccagggtcgcggcgagcgcgcctatgacatctactcgcggctgctgcgggagcgcatcgtgtgcgtcatgggcccggtgagcgccccgcgccgggaccctccccaggactctcccaagcgcctgccgacactccctgcgcccctccttccctggccccagactttccctcaggctccgctccccttctaacccccttccctccccttctgactcccctcctggctcccggtcccccaacccgctcctcaccccttctctgctcctcggctcttaatctccgacttccttcctgacacctggcaccgctcccctcattcctacgctcaagactctccccagccattctcaccccttcctttcctgtgtccctagccccctgactccccccttcctgtgctccaaaccccctgggtcctctccactactctctccccatccccttctggggcctaaattcttccccatcccttttactttgggctctggtcccccttcctggttccctgacccatccccagcctcccttaaaactctctccccaccccgaatctggggacacccctgccctctccacctgcagatcgatgacagcgttgccagccttgttatcgcacagctcctcttcctgcaatccgagagcaacaagaagcccatccacatgtacatcaacagccctggtgagcagggtctttcctgggtgccaggggcactcgtcagggcacacgggtgactcaggggaccagaatcccgggtcagggatgttctctctctgggaaagggtgcagagcgtcagagttccagaagtggctttaaaccaccaaaaggtgcctgttgctggcttttgagcctcggttcacaagtcaggatgtggcctctttgatcctgcacatactgttctgccaacctgacccggctgacatttaaaaattggtagattttaggccgggcacagtggctcacaccggtaatcccaacactttgggaggctgaggcgggcggattgctcgagctcaggagttcaagaccagcctgggtaacgtagtgagaccccatctctacaaaaaaagtacaaagattagccgggcaatgtggcgtgtgcctgtagtcccagcaactcggaaggctgagggagaaggatcacttgagcccaggaggtcgaggctgtagtgagcccatctcaaaaataatcataattggtagattttttccccctccccaaaaaaagtagtcaattttgattgagcacttatgatggaggcatttttttttttttttattgagatggagtctcgttctgtcacccaggctggagtgcagtgttgcaatctcagctcactgcaacctctgcctccttgggttcaagcgattctccagcttcagcctctcaagtagctggggattacaggcatgtgccaccatgcctgtctaattttttgtatttcgtagagatgatgtttcaccatgttaggctggtcttgaactcctgacctcaagtgatccacccgcctcagcctcccaaagtgctgggattacaggcatgagccaccacgcctggcctgatttctagtttctcttggaaatttagtagatctgatcccatggtccactggcacatctggcaagagtcagctgactgtaaagcaagcgctctgccttttgcctgcacctgggccgtgtcacttgtttttgtcacctcccaacccctggaagcatttgtgtttgtgaaccctgctttaaagagctgcttctagaccggacgcagtggcttacgcttgtcattccagcactttgggaggctgaagtgggctgatcacttgaggtcaggagtttgagagcagcctggccaacgtggtgaaatcccatctctactaaaaatacaaaaattagccgggcatggtggtgtacttgtaatccagctactcgggaggctgaggcaggagaattgcataaacccgggaggtggaggttgcagtgagctgagatcgcgctactgcactccagcctacgtgacagtgagactcagtctcaaaaaaaaaaaaatagctgcttctggctgggcatggtggctcacacgtgtaatcccaacactttgggaggattgcttgagcccaggagttcgagatcagcctgggcaacatagtgaaagcagtgaaacccagtcttaattttttttttttttttttgagatggagtctcgttctgtcgcccaggctggagtgcggtggcgctatctcggctcactgcaacctccgcctcccgggttcacgccattctgctgcctcagcctccggaatagctgggactacaggcacccgccaccacgcccggctaattttttgtatatttagtagagacggggtttcactgtgttagccaggatggtcttgatttcctgaccttgtgatccgcctgcctcagcctcccaaagtgctgggattgcaggcatgagccacagcgcccagtcatattaatttttaaaaaaggaggggggctgcatctgttccaccctccccaggtttaggagatggaatagggaaagggtcggggggagctggtccagcccctcacttgctcccccgcccacaggtggtgtggtgaccgcgggcctggccatctacgacacgatgcagtacatcctcaacccgatctgcacctggtgcgtgggccaggccgccagcatgggctccctgcttctcgccgccggcaccccaggcatgcgccactcgctccccaactcccgtatcatgatccaccagccctcaggaggcgcccgggtgagtgccagacacgcgagctgctgttgggaatcaggacagggtctagacagaaggactgactgggcggaagtcaagcgtgggaggggatgtttttttttttttttgagatggagtctcactttgtcgcccaggctggagtgcagtggtgcgatctcggctcactgcaagctccgcctcctgggttcacgccattcttctgcctgagcctcctgagtagctgggactacaggcgcccg[138 bp omitted]ctgggccagccgggagtggatgtcttaaaatgtgcaggccaggctgggtgtggtggctcacgcctgtaatcctagcacttcgggagacagaggcgggaggatcacgtgagctcaggagttcgaggccagccaggggaacataatgagaccttgtctctattaaagaaaaaaaaaaaaaaggccaggcatggtggctcacgcctgtaaatcttgacactttgggaagctggag[131 bp omitted]tgagataggagaatcacttgaacccaggaggtggaagtgagctgagattgcgccactgcactcaagcctggatgacagagcaagactctgtctcaaaacaacaaagggaaaaaaagaaaatgcactgaggagttgtttgctgtctcttgagaattagcttcagctgggcacagtggctcacatctgtaatcccagcactttgggaggccaaggcaggaggatcacttgaggccaagagtttaagaccagcctgggcaatggtgagaccccatctctaccaaatatttaaaatgactcgggcatggttatgcttgcctctggtcccagctactcaggaggctgaggtgggaggattgcttgagcctgtgaggtgaaggctgcaatgagctgtcttgtaccactgcattccagccccagcaacagag[131 bp omitted]gcaagaccccatctctaaaaaaaaaaaacaaaaaacaaacaaaaaaaaggcttagctaatgctgagacagagagacactgttcctcccagtctgcaaggcttcagatgcagaaaataacatatacttaatccagtcagaaagccttcctggtagtggcaagactgaagcaggatatcgggggatttacacaaccccagcccaccagcctcaaaccggaagcccaaagcccagggaagctcctgagtgccacctccagcctccctgtgaggggctgacgccgataccaacctttaccccctcactcccttggacgtccctcagggccaagccacagacattgccatccaggcagaggagatcatgaagctcaagaagcagctctataacatctacgccaagcacaccaaacagagcctgcaggtgatcggtaagcaccctcctttatttcatcctggtccgtgcacagacggaccaggcgttgctctaagccagggcttctccacctggcccctgcggactttcagggctggatcgttctctgggatggggggaccatcccagaggtcagcctggccaacatggtgaaatcccatctctactaaaaatactaaaaatggtgtacttgtaatccagttactcgggaggctgaggcaggagaatctgtggaatatgagagtttgaggttacagtgagctaatttttttgtttgtttgtttttttgagacaaggtctggctctgtcgctcaggctggaatgcagtggcatgatctcggctcattgcaacctctgcctcctgggctcaagcaattctcctgcctcagcctcctcagtagctgggactacagggatgcaccaccatgcctggctaattttttgtagagacgtggtttcaccatgttgcccaggctggtctcaaactcgtgagctcaagtgatccagctgcctcagcctcccaaagttctgggattacaagtgtgagccaccacgcccagccataattttattaaaatcaaaaagtgaggccaggtgtggtggctcacacctgtaatcccagcactttgggaggctgaagtgggaggatcacttgagttcaggagttcaagaccagcctgggcaatatagtgaaaccccatttcatagaaaagaaaaaaaaattttagctgggcaccatggctcacgcctgtagtaccagcactttgggaggccgaggtgggcggatcacgaggtcaggagttcaagaccagcctgaccaacatggtgaaaccccgtctctaccaaaaatacaaaaactagccaggtgtgttggcacacgcctgtaatcccagctactgaggaggctgaggcatgagaatcgcttgaacctgagaggcggaggttgtagtgagtcgagattgcaccactgcactccagcctgggtgacaaagtgagaccctgtctcaaaaaaaaaaaaaaaaaaaaagtgaatgttccacagcatcacagatgaattttgcaaatatgttgcatgaaagaagaataaacactctgtgattccatttatttaaactataaaaacaaggagagctaatttatgctgttagaggagtggttgctttggggtatggggagggggtggcaaggattagtgactgtcgtgggcccaagtggggtttcaggggtgctggcattattccatctcttggtctgggtgctggtcctgtagggtatgttcagtctgaaaatccatcccaccagacatttacgaatcatgccctttcctgggtgtatattatacatcaataacaatttttttttttttttgagatggagtcttgctttgttgcccaggctggagtgcagtggtgcagtctccacctcccagatttaagtgattctcatacctcagcctccctagtagctgggattacaggcgtgtgccaccacacctggctcatttttgtatttttagtagagacagggtttcaccatgttggccatggtgaaactttgaaggccaatggtgaaacatgaggccaaactcctggcctcaagtggtccacccacctctgcctcccaaagtgctgggattacaagtgtgagccaccgtgcctggcccaataacaattttttaaaaaacaaaattgaaattggtattttactgatacctaggggaaactgaggcactgcagaatgaggacatgtctcagtcagcttgagctgcttaacaaaacaccacagacctcaacagagatttatgtctcacagttctgggggctgggaagtccaaggtcagggtgccagctgattcggttcttggtgagtgctctcttcctggcttgcagacggccgccttctcgctgtgtcttcacatggtggagagagagcaagtgcactggtgtctcctcttataaggccactaatcccatcaaggggcccctgaccccatctctcctaatgacttcccaaggaccccatctccaaatcccatcccactaggggatggggcttcaacatatgaacttggggtggtgggcacaaacattcaggccaaaacaggacccagacctggccctgggtctctgctcttaccctaatgtgtctcacctcctgcttccccaccagagtccgccatggagagggaccgctacatgagccccatggaggcccaggagtttggcatcttagacaaggttctggtccaccctccccaggacggtgaggatgagcccacgctggtgcagaaggagcctgtagaagcagcgccggcagcagaacctgtcccagctagcacctgagagctgggcctcctctccagaatcatgtggaggggccagaggcctgccagacccccagctgggccctgctcaccccttgttgctgggcttggaggggcctcttgaggaacttttaatttgcaggggtgcccgctatggacggggcattccagctgagacactgtgattttaaattaaatctttgtggtctttgctctgcgtctgggacaccctcccttctgcaccatgacagcgtgtacacatctgtgtttcacaggccccttctgcttttgtcctgaccccaagaggcaagccatgtcttccttcaacagattctcctgatcatatcctatattccaggcagtgttcttttgtgaagaagacacaagaaaccctcctcaaaagagctccat[133 bp omitted]catggtgaaaccccatttctactaaaaatacaaaaattagccgagcgtggtgcacctgtaatcccagctactccggaggctgaggcagaagaattgcttgaacttaggaggtggaggttgcagtgagcaggatcacgccactgccctttagcctgggcaacagagcaaggctctgtctcaaaaaaaaaaaaaaacaaaaacaggaaaggtggcatgcaagtgtgagggtaagcgtgttacagttttttatggggtaatcagggaagccctcactgagaaggtggtggttgagcaaagcctcaaaggaggtgaggggtggagcctgtgtccaggcagagggcacagccagtgcaaaggccctgtgacaggactgtacctggcatgtgaggacctatgaggaggcccgtggctgagggaaggtggaagagaggagatcaaaaagtagaggtgaaaattagccaggcgtgatggtgcacttgaacccgggaggcagaggttgcagtgagccaagatcacgccactgcactccagcctgggcaacaaagcgagattctgtctccaaaaaaaaaaaagtggaggtgattgagaatagatcataaaaggcctgacatctaaaaggagggatgtgaaccatggagggttttgagaagaggaaggaaaataaggatgactatgactcctgaggagtgcaccatgagcagaaactggagagcagttaggatagttggagtaatctagacgaaagctgatggcagccctggccgagtgatgagaaaaagtcagattctagctaggtgggatgtgacagagagcagtttccagaaactccgagctgatggcccaaagcaggaagatggagacctgtcgcctgagatgggaagtgtaggcaaaggaacaggcttggggagggatcaggagttgattttggatatattatacctgatgttttgatatgtccctcgacatcagggtcaagaggttgaaataaaaacgtaggtgtcatcggccgggcgcggtggctcacgcctgtaatcccagcactctgggagaccgaggcgggcggatcacgaggtcaggagatcaagaccatcctggctaacagtgaaaccccgtgtctactaaaaatacaaaaaattagctgggcgtggtggcaggcgcctgtagtcccagctactcgggaggctgaggcggcagaatgg[133 bp omitted]aggctcattaacagtcagactgagacctggctattggattcggcattgtggatgtcactggtggccttaaatcaggccttttctggtgctgtgggagccaaaagccaggctggagtggatccagaaaggataggaggaaacatatcagacatagacaagtctttcgaggaattacactatcaaggggagcagagggtgggggggcagatgtagctggagggagaaatggggtcaatatttttcaaaatgcaagcattcgggccggggtcgggggggcgctacgctcagcagttacagtgttgcagtttgcattatgcacatttaaaatacatacaaaagtacccagagctttgagaggctgaggggagaggatcacctgagcccaagagttccaggctgcagtgagctatgatcgtgcccttgcactccagcctgggcaatagagggagaaaataataaaataaaggccgggcatggtggctcaggcctataatcccagcactttgggaggccgaggcagacgggtcacctgagatcaggagtttgagatcagcctggccaatgtggtgaaaccctgtctctactaaaaatacaaaaaattagccgggcgtggtg[132 bp omitted]caaaaaaaaaaaaacccaaaaaccaaaaaaataaaaaacaaaaattagttgggcgtggtggcagcttcccgtaatcccagctactcgggaggctgaggcaggagaatcgcttgaacccggaaggcagaggttgcagtgagccaagaccgcaccattgcactccagcctgagtgacaagagcgaaattcggtctcaaaaacaaacaaaacaaaaaagctgggcatgatggttcgttgcctgtaatcccagctactcgggaggctgaggcatgagaatcacttaaaccccagaggcagcggttgcaaatcttcagggcctgagatcgtgccactgcgctccaggttgggcgacagagtgagactctgtctcaaaaataaacaaataaaaataaatataaacaaaagtagagaaaacagggtaatgagaccccacgtacttatcacaccaattcaacaattaattcacggtcaaagatgattcttccctacccgccccctccctgcccccacagcctggatttatgtggaagcaaatcccagagatcttttttctgtaaatatttttttttcagtttgcgtttgtaaaaaacgatgactcttttttttttttttgagacaatgttttgctgtgtcgcccaggctggagtgcagtggcgggatctctgttcactgcaacctccgcctcctgggttcaagcaattctcctgcctcagcctcctgagtcgctgggattacaggcacgcgcgccaccaagctcggctcattttttgtattttcagtagagacgggttttcaccatgctggccaggctggtctcgaactcctgacctcaggtgatccacccgcctcggcctcccgaagtgctgggattacaggcgtgagccaccacgcccggccgaggaatcaaaaagacaaccataatgccattttcaaacctaaagtaatagtgatacggagacggggaaatgaatgatacctcgctctgacctttgaccataagccctaactctggatagctggccccaccacacacataatcgtggccttgacgtcagtcccctgaccccggacccttatctcggcctgactgtactctgcccttaacctctagccctagtcgactccataaccgtggccttggccccagtccccctgacttccggacttcagaccagatactgcccatatccccttatgaagtcttggccaggcaacccctagggtgtacgttttctaatgattaaagaggcggtgctaagctgcagacggacttgcgactcagccactggtgtaagtcaggcgggaggtggcgcccaataagctcaagagaggaggcgggttctggaaaaaggccaatagcctgtgaaggcgagtctagcagcaaccaatagctatgagcgagaggcgggactctgagggaagtcaatcgctgccgcaggtaccgccaatggcttttggcgggggcgttccccaaccctgccctctctcatgaccccgctccgggattatggccgggactgggctgctggcgctgcggacgctgccagggcccagctgggtgcgaggctcgggcccttccgtgctgagccgcctgcaggacgcggccgtggtgcggcctggcttcctgagcacggcagaggaggagacgctgagccgagaactggagcccgagctgcgccgccgccgctacgaatacgatcactgggacgcggtgagaccggcagcgccgggggcgagggacgggggctcgtcgggggcgcggcctggggacgtggagcatcagatggggcggggacacgctgggggcggtacctagagcggggatttggagcggggacagaggagacgagcgccgggaccgggcagggccacactgggggcggttacagtaccgtttagcgtgggggcggggctacggtgctggggttgtggggccaggggggtcgggcgcagggatggggcggggccacgctggggcggggacaaaggagacagcgcagggatggggcgggggcactctgggggcgggacaggaggcgagcgtagggacggggcgtggccacgctgggggcggggacagtggggaccagtgctgggatggggcgtggccacgcttgggggcggttacagcgcagtcgagcgtgggggtggggccagggagtcgggtgtagggttggggtgcgattacgctgctagcagttacagtgcagaagaacgtggcggctgggattggggcgtggtcaggtcgtcgagcgcatggatggggcggggccaagcttggggcggggtccgtggagtcaagcgccgggatgggttggggccatgctgtgggggggacggggaagtcgaggtttagagagggcagaaccacgctgggggcggagataggggagacacatgctgggatggggcagggcctttttggggtcggtagctattgcagggatttgggagctgggctatggtgggggctgggctgaaactctggctgtgggaggggcgggacctgggggatgaggaccttggggtcagggagagcacttttgcgacctgggaccaaggttaggggcggaaacggatgtggagccagatgatgttgagagacagagacaggacacttgggtggggtcaagttgtagggagattcagccaattgaatgctggggccgggccagcattggggacctggaattgtagcctcagggtgagtactaaggactgaggtcacacctaggtagggccatagttgaggggctaggggagtttgagttgagggcagggtcaagagtcacatagggaaaccagccccttgccgttttctgcccctccttgcctcagtttccttgttccctctgggagctcccaggcttaaccgagctctctgtgcaggccatccacggcttccgagagacagagaagtcgcgctggtcagaagccagccgggccatcctgcagcgcgtgcaggcggccgcctttggccccggccagaccctgctctcctccgtgcacgtgctggacctggaagcccgcggctacatcaagccccacgtggacagcatcaaggtgggcagaggacggtgccttggcactcccagccagggggtaggcaggcccggttagatcctgacccatccccacgcctcttttgcagttctgcggggccaccatcgccggcctgtctctcctgtctcccagcgttatgcggctggtgcacacccaggagccgggggagtggctggaactcttgctggagccgggctccctctacatccttaggtacctccatccaggcagcacccacccctccaagaatgtgccatccgcccaccctgtgccctgggtactttccctcaatccagccctccccgaagacgcctttaccccagggtctgtgtgggaggcagcagggggctggaatccaggaggctggaatccaggtctgcctggagcaggggctgccctccttgcacccagtcacagcctgtttcttcctgcaggggctcagcccgttatgacttctcccatgagatccttcgggatgaagagtccttctttggggaacgccggattccccggggccggcgcatctccgtgatctgccgctccctccctgagggcatggggccaggggagtctggacagccgcccccagcctgctgacccccagctttctacagacaccagatttgtgaataaagttggggaatggacagcctaactgggacattgcagtggctgcttgctggggccgggatttgcaggggaacccaggatggcactggcccatagggagctccaggtgtggctggctggacacatggtcaaagtcacaaggccgggagagtggtgtcctttattgcactcactgctggtcgccccagcccactcccctcctcgttgtctctgcatccaggtctccaataaataagtcagccgagctcccccagcactgcagcttctgggtgccaggccgggcaccctcagccaccacagccgcaggcagccgccgagagctggggcagccgctgccagcggtggcggtcatcgaggaaggccacgtcggtgtagcgagtgggccggcagcagggcccgccgtgggctcggccctggccctgcagccgggccagcgccaggccatgctgggtgcgggcaccacgggggcagctgccggcgcagtagcggaagatgaccttctcctctgaggcgtagcccaggcctagctctgccacggacagggtcaggctccacagctggcatggaccagacagggctcggcgcaggcgggcaagggggcggtgggtgcctgtgggagggaagggcgctgacagtgagcagggtcagggctggggaaagttgggaagtcacagagggtccctggaagtccttacccagccaggtccctccagcctttgccacctgttcagacgagaactctccatcggccacgggaaccccacgggcatcggggccccagccctgtcccagctgcagggacaggagcagcagggagcccagcaggaacttccctacggccattgtgacgggcaggtcctgagagtgggagctgtgccccaaatttatgccctgcctgggctgggagctaacctcttcactgccggcccctgcagccaggaggccccacgtctgcaccagcccatctcctgcaccctcgaatccaggcatctgctccttctgccccacaccccacccttctaagagttaagggctcacccccagcctaccccaccccgacattccacacagccatttccgacgccccagacaccccctgatttacgagtgctgtgctggcggccagggcaggcaactggtgttcccccgacctgctgcctggagtggaagtcagggggcttcatgggaccccggtggggtccctccccactaagtcagggtgctggggctcaggagcccccacgtgtatcatgtgccaggtggagcatatgtgagtgctgggaaaggtggcttggcaggggactgagtccacgggaaccctccatggtggctcccgcctggaggattaggacatcatgcccctgtctccgggcctggctgagccagcatcaaaacaggaaaagggagaggcctggggacagccaagggtggggacacaaggggacagggacgcctgtctcgggaaggccaacctgagacccctataactgcagccccatcctgggatctgagcatgtcagagcccccggggcgatggaggctgtccaggtcatggtaacgtctagcacgatgcagacagataagggctctcgaggcttccatacccagccccgtgtgagcccagtcccctcaccggtacaggggagctcctcagaacccctcctactcggcttggtgaggaaagagatgggcacttagagtgtaaggcagtgcccgtagcttcgaatgcaaaaacaagcaaacagcttgtgattgtccgaaggggtgcttgactctaagcacccacaagattggggaaaatcagaaaaccctcacacacaacccgtgtgacccaggtgcaccctgtgctgttggtgggggtgtaaattgctagcagctctttggatgagcagctgctactggggaattgtaaattacaccctctgccccaggagccctgtttgcggggttcctcccacacaggcaagtgaaacagccagcacagggacatctgatgccttcttcatattaggaaagtctggaagtggcctcaactccatccgtgagggattgcttcgatgattatgttgtggtttttcttactgaagtgcttattgagatgataattttccgatggaaagaaaagcctgggcttggcgtggtggctcatgcctcgggaggctgaggcgggtggattacctgaggtcaggagtttgagaccagcttgaccaacatggtgaaatccatctctattaaaaatacaaaaattagctgggcatggtggtgggcgcctgtaatcccagctactcgggaggctgaggcaggagaattgcttgaacctgagaggtggaggttgcagtgagctgagattgtgccattgcactcaaacctgggcgacagagcgatactgtctcaaaaaagcctggcggggcccagtggctcatgcctataatcccagcactttgggagggtgaggtgggaggatcacttgaggtcgggagtttgagaccagccaggccaa[141 bp omitted]aactccgtctctattaaaaaattagctgggtgtagtcccagctactcgggaggctgaggcaggagaatcgcttggaacccaggaggcagaggctgcagtgagccaagattgcaccactgcactccagcctgggcagcagcatgaaactccgtctcagaaacccaaaaaacaaattagctggaccgtggtggggcgtgcctgtcatcccagctactcaggagactgaggt[133 bp omitted]aacggtcctggtatttgaacccaggtcctccgtgaatgcaaaacccctgctcctcaccacagggcctcaccacccagcctccttacatgaaggcccaggcagtgggggtggctggggcgaaactgctgaggcagcggctccctccagagctgcctccctgctgcccaagaaggcctggtgggagaagggggagggaggttggcctgaactgggacattccgaggaattagccagacatctcaggcattcctgctcggcagccaagggctgcagaactgggtggggaagacttccacctgcaagtttccaaccaccggcaagacagaagggattgcccggaagatgggttcaaaagtagtggctgcaggcaaattccatttccagccatattaatgtttccagccacattttccagttccatttccaggaactggaaaagccctcccttacagaatgcctggcaacgccagatcaaatatatgcatgaccgagcttgtaagaagggagaagccccccgaaacatcaccgggaacctcaaacatagggacccacaatcggggcagtggggggggttggctttggtggccacctgcaagctgagaaccacacacaaaatgggctggggctggcgctcctgggtagctagcgaaagccaaggctgaaccatctggaaggactgcctgcaaagtaggccaccccggattcccacagagcccccagctggccatgagcatccaatcccaaatcacaagaaaatctatcactaaggggagtcagaagaaacaaaaggatgcccgggaacttcagcttctaggattgtcagacctcagtcaggatgagtaaaataaaaacatcagccaggcgtgggtgggtgcagtggctcacgcctgtaatcccagtactttgggaggacgaggcaggcagatcacctatggccaggagttcgagaccagcctggccaacatgctgaaacaccgtctctactaaaaatacaaaaattagccaggcgcggtggcgggcgcccgtaatcccagctactcgggaggctgaggcaggagaactgcttgagcccaggaaccagaggtcgcagtaagccgagattgtaccactgcactctagcctgggcaacaagagtgaaactctgtctcaaacaaaaacaaaaacaaaacacattagccaggcatttaatggtacacgcctgtggtcccagctactcaggaggctgaggtgggaggattgcttgagcccatgagttcaagactgacctgggcaatacagtgagacctcacctctacaaaaaattaaaaaattagctgggcgtggtggtgtgcactacttgaaaggttaaggtgggaggatcgcttcagcccaagaggtggaggttgcagggagccaagacggtggacactgcaatccagcctggtgaacagagcaagaccctgtctcaaaacctaaaatataaataaaaataaaaccatgaaagatgggaccaaaacataaggaataagacattatccaaacagagtagcagatctaaaaaggaaacaaagaaatctgagcaatttattattattttttatttattgagacagagtctcactgtcacccaggctggagtgcagtggcgtggtgtcagctcacagcaacctccacctcccaggttcaagtgaatctcgtgcctcagcctacggaacagctgggacaacaggctcccgccaccatgcctggctactttttttttttttttgtgccaggatttcattctgtcacccaggctggaatgcagtggcaccatcatagttcactgcagccttgaactgggcttagcctcccaagtagctgggactgcaggcgctcaccatcatgcccagccaaaactgaagacttactgggctatgtggtggataagtcacagctgaagagagacttagggaagtggaagggagaactgtagaagttacccagtgggcagcacaggcccttggtcagtgtgagggaggccgagccaggaggaggaggacaataagaaggcctaacaggcatctgaagattccagaaggaagggccagaggaggagatggcttaacttttccagaattgctaactacggggccctgggagtcagggagcaagcaggatgtcgaagggtcactgagagcctgaagttctggagggcagagccatgtattggacagagcctcactctaggatggcgaaggggcagtgagagccttaagttctggggggcagagccatgtattggaccaagcctcactccttgagggagaagtgcattttgtcgttgatcatcttgcgctcggggttgagtcgcttgaggatctgggccaacacgttcactgtctgctcgctgctcagccctgtcttcttggtctggaactttttcagcaggtccttagtggtcatgggcttccgtgtcaggtagcggcgcacggcatcctcagtcacctgcacgtcgctgaggatgggaggacggggaaggtggcatcagtgagattgtccccagtagcccttgccctgccccctgctgtcctcgtcaacttacccgctgttgggtgttgtcttgcctgatggtggctggggtgtcgacttcccagacaggctctggggtcccgtgtccagccgcaaccgcttggctgcaggcatctcgctcacccgcttccctgtgggagtggggtcagggctgagtcttgcaggcaggaggcagaacccctgggcaggaccccaggctgggcagtgccaggattagggttcaaggggatcagggagagacaggcctccacccgcatctccatcccctctctgtcctgagccccaacagaggtcaggaggctgtggctgtggctgtggggagcggggaggccacgggcactcaccttgctcgagtttgctggcagccgcccgcagggtggaggaggtgctgccaccctctgcgctgggcgtgcctgggcggctgttgccccttgagctccctcccgacggcttccgctctctcttgggtggcgtcttcttcttctgcagaggtcagggttgggaggtgggtgagtctgcaaacagacgcccaggcctcccccgccaccgggctgggccttaccgccatgaagagggctgaggaggcctcgctgtcaatgtcgctctcctctgagctgtccgactcctcgctgctgtctgcggggcacaggaaaggggtcagggccagagcaaccccgggacccggtgcccactggtgcctccactgcagatgagggaggcctgcaggggagaggggaggaggtggcagggcgccagggcccgacccaagcctccaatatgggggccacatgcgccgcacctttcctgcgcttcttctcctgcggggtgggtgccttcttctcctcctcctcctccttgtcctcctcaggcggcttctcctcctcactctcctcactactgtcgctctgctcatcgacacctgggaggggcagggtatgagcaagagcagggaagcaccgcccccatctccccggcccgcccagccatcgcctacccttgggcccctcctcctgctgcggcgccttggccttgctctcaggctcttcttgggagctactgtaagacggggatggcaaaggatgagcgcgcgctcgcgaggctgcatggggtctcgcaggcgcctcccgtcggcctcacctggagccgtctgacatgtagtccacctcttggccctcgaagtccccatcatcgctgtcctcgaaggcctcgtcgtctgaacccttcttcttcttctttttcctgccgcccttggccagcggcgccttcttcttggccttggggactctgccccctgggaagggaggaaaggaaggaaaggagggaaagtgaggaggaaggcagtgggtatttattgtgtttttcacattttgtgcagttttgacatcctggggggcctcactgactggggagactacacctccagggccagcccaggagctcagctctcctaaacaaactcccggcagaccccacacccccacccaccttctctagcgctcacagaccactccccctctcccagaccacccgggcgaggcacctgataaccagggacacagcccctacagcccggagcgcacaggagttattgaaactggtcaacctagagttgcagtttctcataggaacccccgtaaaggccacagccaggccaggtgcagtggctcatgcctgtcatcccagcactttggcaggctgaggcgggaggatggcttgagcccaggagtttcagaccatcctgggcaacacagtgagtgagaccccagtctctacaaaaaacacaaaaattaggccgggcgtggtggctcacgcctgtaatcccagcactttaggaggccgagacaggcagattacctgaggtcgggagtttgagaccagtctggccaacatggtgaaaccccatctctactaaaaatacaaaaattagccagcatggtggtgcatgcctgtagtcccagctacttgggaggctgaggcaggagaatcacttgaacctgggaggcagaggttgcagtgagccgagattgcgccattgcactccagcctgggcaacagagcaagactctgtctccaaaaaaaaaaaaaaaaattagccgggtgtggtggtgcacgcctgtagtcccagctactcaggaggctgaggtgggaggatcgtttgaccctcggaggtcaaggctgcagtaagctgtgattgtaccactacactccagcccatgtgagagagagagagatcctgtctcaaaaaaaaaaaaaaaaaaaagaagggccatggctcagctctcccgggctctggccttgcctcctgactgacatcactgctcctccaggcggcctcgcctgactctcattcttttttctctgagacggagtctctctctgttgcccaggctggagtccagtggcgtgatctcggctcaacacaacctctatctcacgggttcaagcaattctcctgcctcagtctcccgagtagctggcactagaggcatgcaccaccatgcccagctaatttttgtgttttcagtagagacacggtctcactgtgttggccaggctggtctcaaactcctgatctcaggtgatctgcctgcctcagcctctcaaagtgctgggatgacaggcgtgagccactgtgcccggccccacttgcctctcattctagggccactgtgagcgatggtagactttgccttcactggcactgcctgagcaggcacctctgtgacctaatgcccaggcgcccgtactcaccctcctcaccactggcatcactggcatcggacgacatctccaggtcgtcctccaggtcgtggatgcgcagctcgctcgccttcctgcggccacgtttctccttctcctcctcatcctcgtcctggtcctgatccttgagccgccgctgctgcatgatgctgaagtggttcagcaccttgttcctcctgcgggccaggcacaggggggctcatgccgggcctggcaccaccctgcatctgtgcttgcagggggcgagccccagggcaccacccacatagccttcaaggtgatgtggcccccggggacttgggctgtggcacaggactccctgaaaccacacggatagagccagcccttcctgccttcccgttctgccccgagtccctcaaagagcaggtccccatgtgctgctggagtctcagcacctccctcggactcagagtctggccccaatccagtcacactggtttcttgctattttttattattatttttttattttctgagacagagtatcgctctgtcgcccagactggagtgcagtgatgtgatctcggctcactgcaacctccgcctcctggcttcaagcaattctcctgactcagcctcccagatagccggggttccaggcgcctgccaccacgcccagctaatttttttttttttttgtatttttagtagagacagggtttcaccatgttggacaggctggtctcgaactcctgacctcatgatccaccttggcctcccaaagtgctgggattacaggtgtgagccaccgtgcccagccagatcttttgttatcttaatttatagatgtatttttctttaatgacaaaacatactgtttccattggaacaatgtaacgttgt[145 bp omitted]gaaacctcatccctacaaaaaattaaaaaattagccgggcgtggtggcatgtgcctgtagtcctgactactcaggaggctgagggaggagaatcaattgaacccaggaggcagaggttgcagtaagctaagattgccccacagcactccagcctcggtgacagagtaagaatctgtctccaaaaaaaaaaaaaggactgcatttaataggaatgcatctaacatgggcaaggcccaggctggtgtgaaagataatgaaactgctgcttaacactgtgagtggctttaccacactgagccatgcaccaaaaaacagtgacagtttggtgcagtggctcaagcctgtcatcccagcactttgggaggggaggccgaggctggaggctcgcttgaacccaggagtttgagaccagcctgagcaacatggcgagacaccatcaccatttgttcttttcttttcttttcttttcttttgagttggagtcttgatctgtcaccgagactggagtgcaatggtgtgatctcggctcaccacaacctccacctcccgggttcaagcaattctcctgcctcagcctcccgagtagctgggattacaggtgcccgccaccatgcctggctaatttctgtatttttagtagagatggcatttcaccaaattggccaggctggtctcttggccaggctggtctcgaactcttgaccttgcgatccgctctccacgtgcccagcctgaacagttcttagctaagtagatttaacatctgatcaagagatggcattctggccgggcaccatggctcacacctgtaatcccagcatattgggatgccaaagcgggcagatcacttgaggccaggagttggagaccagcctgggcaatatgctgaaaccccttctctactaaaagtacaaaaattagccaggtggggaggtgcacgtgtgtagtcccagctactcgcaaggctgaggcagaatcgcttaaacccaggaggtcgaggttgcaatgag[132 bp omitted]taaaatgccaaattcttctccctaaaacttacaaagcagattctaaggaaaatacagcaaaagcgaacctgcccccccagcaatgattgatcgactgattttacagtggagccccaggaactcaaccaaagtggagcaggcaggcagacctgggggctgttgttccaggggagcaggggtacagaaactgccccacaggctcggaggctcatgacctggtggggaggacgctctgacttcgtgccatttaccggggttgcttttggagctgagccaacctatgactcttcaga[143 bp omitted]accaaaaaaatagaaaaaaattagccgggcatggtggcaggcgcctgtagtcccagctacccaggaggctgaggccagagaatggcatgaacccgggaggcggagcttgcagtgagctgagatcgcgccactgcactccagcctgggtgacagagcgagattcggtctcaaaaaaacaaaacaacaaaactaaaacaggccgggcgtggtggctcacggatgtaatccccacacttagggaggctgaggggggcagatcacctgaggttaggagtttgagaccacctggccaacatggtgaaaccctgtctctacaaaaaatacaaagttagccaggcgtggtggtgcatgcctgtaatcccatttctctacttgggaggctgaggcaggagaattgcttgaacctaggagtcggaggttgcagtgagctgagattgcgccactgcagtccagcctgggcaacaagagcgaaactcagttcaaaaaaaaacacacaaacaaacaaacaaacaa[132 bp omitted]ctcctgcct[175 bp omitted]cccagccgaaaaaggtgtttttttaacctttgggagccatcgactctttgagcatctgctcatctgtgacctgtgcaaatgccatttgtagatgcgtccagagtgccctccccaccatctgcaagcaccctagggtggtggtggccctacggtctcatccaaagccatacatccaagaccaagtgctctgggcccccagcctcgtccccctgcccacagtcactctgcactggcctcatgcactgtgtccctccacagcccttaactgcacccgccccacctctgaggccgatgtcactgctagagaaaccctcctcgggtgccctgcctggagctgctgccctgcagtggatcaggctgtgtgacctgcagcctgcggaaagccaagggggcagttagaccccaccctgctctgccaatttgagctccgggtcacagactctggctctggcagcaccctctggggtgccccattgtggccctaaggcctcctatctgtttcctcctgaactgacagctctgagacggccgagtggggtctgccctggttacccctgagtccccagctcccagcacagggcctggtgatatatccatggcaaggcaccccatttccctcacttctgtccccagccaccacccagcccactcacctctcccactcctcctcggcctcctcggcagtgagcgtgcgatgccgggccagcggtgtgaaattgtaccagttgtgcacggggaaggcctcgaaggccccgtcggggcactgggtgaagatgtagtaggacgtgttctctgttacgcctcccttcttgatgcccttgaacctgcagggagccacggtcatggcctggcccatagggaccagccccagcccccccgtgtccccccggggcctgcctcctttatggcacttgccataggaggaagaccaagaaatgcccatgaggcctgggcaggcccttcaaccacctgggcctcgtcaatttccacatctggggaacagggccggcgcacctaccctgcaaagtgctgggcgtgtgcacatcgggatcatttctggaaagactgtgtgagattatctcaggagagcccaaccctgcagtcaaactgtctacatttgcctccagctctgctatctgtgggccacacccgggaaactgaggagccaagtgagaagatggggcgggaaggcatggccaaatttttttttttgagatggagtctcgctctggcacccaggctggagtgcagtggcaccatctcagctcactgcaacctccacctcccgggttcaagcaattctcatgcctcagcctcccgagtagctgggattacaggtgtctgccaccacacccagctaatttttgtagttttagtagagacagggtttcaccatgttggccaggctagtttcgaacccctgaccccacgtaatccgcccgcctctgcctcccaaagggctaggattacaggcgtgagccaccgcgcccagccatggcatggccaaatctgaagtggacacctggcccgggccaccatttcctcaagcctaaacaactgcccagcctccttgaggcctctacctcattcttttctaccccaaagttccggacagtctgggtgagtgcctcttccctgcctacagctttccaaggctccgctggacccagcacatcctggcacccactgccctgtgtgagctgcctgtgtctgtcactatcacccaactgctgtgcctggagcacccttcatcaacctaacctggacccctcctgttctgccctcagtctgccccctctgagaggtcatctcaagtgtcatgagctcccagggctggccacctaagcttcctgcattgtggcactcagagctgcctcagagccaggcacaagcaccaactcagtgaactgtcttcaaaaacacaaccccagggcctgggcagtggctcatacctataatcccagcactttgggagaccaaggtaggaggatcacttgaccccaggagttcaagaccagcttgagcaacgcagcaagaccccatctctaccaaaaatacaaaaattagccaggcatggtggggcgtgcctatagtcccagctactcaggatgctgaggtgggaagatctcgagcccaggagttggagcctgcagtgagctacgatcgcaccactgcactccagcctgggcaacggagtgagaccctgtctcaaaataaataagtaggctgggcacggtggctcacgcctgtaatcccagcactacgggaggccgaggcgggaggatcgccaagttcgagaccagcctgaccaatatggtgaaaccctgtctctactaaaaatacaaaaattagctgggcgtggtggtggcaggcacctgtaatcccagctactcaggaggctcaggcaggagaataacttgaacctgggaggtgtgggttgcagtgagccaagatcgtgctactgcactccagcctgggcgacagagcaagactctgtctcaaaaaaatacaagtaagtaaaataagataacataaataaataaataaataaataaataataaaatcctacagggatggaagtgccagcacttccactgcagcagtgggaatctgaggttcagagagggtaccccacaaagtatgtaagttgaggcctggggatgtggactggtcactaagccggcaccgccaccgccccaccacttacttcctgcctgatttgccgttgacccggagcagccagggctggtcctcgggccggaactccttgaggacgatgccgtacttcttcctccgagcctcctcccgaagcttgcggttgaactcactgcccgcgcccgattcgggcatctcctcctcttggtagattttcttgttgctcaagtcccgctccagccgagcctaggggagcaggaagcaaagcctctcagggtccctggctttgcttgcgcagtgcccccctccaggaacgcccttccttgccctaggccaagctctagattctcaaaaccaacttaccacttggcaacaagggaggagaacggtagcctttgacaaatctgggtaaagggaatttgggcgagccttgcgctctatttttgcaacttaaaagcttgaaattatttccaaattaaaattaaagagaaaaagaccacctggtgaccatcaagcaggccatcggaggcaaaattccttatctgaggaatgtagaagtaattaattagacttccctattatctacagcaggcatctggttccaggattcttttcaaaaaatgtctaagtacctagaatttccacacatctctccagaatgcatgcatatcgaaactcattgtgctgtggctcacacctgtaatcccagaactttgggaggccaaggcagaaggatcacttgagctcaggagtttaagaccagcctggcatcagaatggcttgaacctgggaggcggaggttgcagtgagccgagatcatgccactgcactc[224 bp omitted]gaggcaggagaatggcgtgaacccgggaggcggagcttgcagtgagccgagatcctggcgctgcactccagtctgggcgacaaagcaagactcagtccccaaaaaaaaaaaaaaaaaaaaaaaagaccagcctgggcaacatagtgagatcctatatctatttcctaaaaataaaaaggctgggcatggtggaaggctgaggcgggtggatcacttgaggtcaggagttcaagaccagcctgaccaacatggcgaaacttcgtctctactaaaaatacaaaaattagctaggcgtggtggtgggcgcctgtaatcccagctacttgggaggctgaggcaggagaatggcttgaacctgggaggtggaggttgcagtgagcccaggtcgcgccactgcactccagcctggatgacaagagactccatcacaaaaaaataaaataaaataaataaaaagaaactcattgtgcaacacttgctgacattaaggcaccaaaatctctacaaattaacaatttatcgtgacctacatggctaatgtgatccgaattacccttaagctcttgatttaaggtccatatataccatttccaaaacactctagaatcagccacatctcataacctccactgcctccagtgccctgccaggactcacctagaccagtccagttgcttctaccttggtctccgtttatttgccctcaaacccacagtttgtctccccatagcagccagatcacacacactacaacttcccaattgaagatgctttaatggctcccaaagtcctttctagagcctctgatggcaggggctctgggaaagcccccagcccagtcccctcccttgcccagataaaccatggccaaaaatgtccaacagtgggcacagcttctaaatgttctcctttaaggagaggcctctggtgggcctaccaaacctaacttacagggacacccaggagctaggcctgggcctttgccatttccgtttttttttttttttttttttttttttttttgaggcagggtcttgctctgttatccaggctggagtgcagtcgtacaatcatagctcactgcagccttgaacccctgggctcaagcgatcctcctacctcagcctcctatgtaggactacagacccacgctatcagccccaactaactttttaatttttttgtagagttggggtcttgctattgtattgcccaggctggtctcaaactcctggccttaagcaagcttcctgcctcagcctcccaaagtgctgggattacaggtgtgaactactgcacccaaccctttgtcatctatcttttcttcacttggagaaaagtgagaaaattaagacttagtgactatgacagttaagcaactatcacaaccaccaaggtcagggtcaagttctctcaccaccccagcccctgacccccaggactcagagacttacctgattccacgtagcaaagttgactttgtcggctgcattaaaagccatgatgttatattttttggttgtattcctggagtggatgagaagaggtagtgtcaatccaatacagcaattcaatcattaatttaatcagtcaatgctattgaaccattaattcaatcaaccacccaactggatcgttaattcaatcaaatcattactttaattcaatcactcaattcaattgaaccattaattcaattcaatcattccattcaattgaatcattaattcaattcaattcactcaacaaacccacccagcttcattcagcctgttttgcctggcaacactggatacggaagactccaaggattcccagtctgccagagaagctagacccatcctctcctgaccccaggcagaagaagagcagatggagggacgaagatttgggggaacccaagatgtggagattattgtgaactcagccttggggaggagggaggacaggcagggagtatttcctggaggaggaagatactggagttgagttttgcagaatcatcaagaattcacccagcagagtcacagtttaggggttgaggggaggcactcatggcagaggaacaggatgtacaaaggcctggaaaggaaagacagcctgaccactttgaaacaggacgaggaatatgtccttacagctggcctgggcatcatgggaccatatactcctcgaaggttaggccagggggctggatcaccgtgtattaatgcactcattcattcattcgttcaaaaaagcagtgttgtccccagagaagcctcagcttaatcccagccctgccctccaagtctctcccggtctggagggagaaccacagacagggccagaaatggctggctaagaagatcgtgaaggttttcatttttggggggtggagaggagtgggagatggggctggggacttacttaggaactcgaacgacgtattcagtgacattctggctgctagggccctgcggaaagaggaagcggtgagtgaggggtcgccgaggtcgccgtcggaacccccgaaccccgccaaatccacactcactagggccgccatgggcaatggtcagtggttccgatctggtccgacccgggttcctttcgtctcctctggcgtgcgcgtccctcgatcccggggaagccgccgctcggtgtcgggtctctgtgcctgagcgaggaccccaaccctaggcgcctctggcgctgggaaaaggtaaccggaagaggcgctcaagctactcggtctacgcttctgcggccgcctaacccggaagcgaaaccctcgagcagccgcgtcgcgatggcaaccttcttagcgactgtggccacctcagtgcgcagtcacttatgctcctcggcggctatggtcacctcaaaaggtccaccgcggtccctttttagactcagcaaacctaggccgagtctgagataaactaacgggcctctgtcgctggcgctcttgtatataacgcggttaacttcatcaaatgggggaccgccctctctcgtgacgtcagcacccaaggaccgtggggcatcctgggtgggaagagggagacgaatcccccttgcgggctcccaggcactttgcgcatgcgccttgccgctctggacctggggggcccagaaggccgcgtcaccatagcaaccgaggcctactcgggtcgggtcgaaccgccgcttggctccccatgggtctgtttggggttcatttcctccccctaccccgaaggggtggaccccgtcattcccgcaaaatgaccggggcggggacccttgtgacgttgagccgagccaggaggggtcagagcctgggcggggtcggggcgcgaccaccccaagagctgctggccggatgggtctttgcaagtccaagctgcccgagatgggcagggctctgaggccccaggagaagggtaacgtcgcgggggcggctggctggcttcctggggggaagggaaggaagctgccgagaacaggagggagatgcaggatcccctaccccgttccaggcatgcacacatcccccgaatcatggcagtaacacaactgcgcatgctcacggcgcaaccattcattgctccacttcgcaaatactccagcacctcctgggttcggggccccgcaaggtgaatctgtcaaaccagctccccacggaggattacagtgtcctctcgagggttacagtgtcgtggaagagacagagtcacagcatgggaatctacaacccaggaaggagcaggagaagcacagcggggctctgagggctcagagaagaggggaggtttcagttgggcactgagggatgcataggagttggctaagcaaagggaaggcgggcaagacacaaaagttgggccatgaactacagacaccgtcgatgtgtctgttttcatttatttctcatccaccactaaatgtcaggaaccgccaacccctaggaatataggaatgagggaggcagaaatagtccttgccctcatggagtgt[136 bp omitted]accccgtctctactaaaaatacaagattagccgggcgtggtagcacatgcctgtaatcccagctactcgggaggctgagacaggagaatcgcttgaacctgggaggcagaggttgtggtgagccgagatcgcgccattgccctccagtctgggcaacaagagcgaaactccgtctcaaaaaaaaaaaaaaaaaaaaaagaaggaaaagaaggaaaaaaaaagaacgagtaaacagagaagatcatgacagactgtggccattgctgtggaggaaataggtgtctcagacaaggagtgatggggggaagctctagatggaggctagagaaggccagatggaagttgtggccagaaggaactggggcaggcagggattttccaagcagaggaaacagcaagggagaagtgagtttcaaattcaaagaactgaagccccctggggctgggacaaagagaaggggagtatgggttggggctgggacagagggaaggggagtaggatatggggctggaacagagagaaggggagtatgggatgagactgggagcgtgggcaagtccctgcctctcactgaacctcggttccctccactgtaaaatgggatgatagagtcctcaggatgctttaaggagatgccgtgtgtgaagggcctggcctgctcaagttcacgtctttgtttttttttattttatttttttg[135 bp omitted]cacgcccagctaattttttgtatttttaatagagacaggttttcaccgtgttacccaagatggtctcgatctcctgacctgaagtgatctgcccacctcggcctcccaaagtgctaggattacagtgctaggcatgagcccaccgcacctggccacatcatttttttttttaaatggagtcttgctttgttgcccagtctggagtgcagtggcacaatctcggctcactgcaacctttggctcctgggttcaagcgattctcctgcttcagcctcacgaataggtgtgcaccaccacacccagctaattttttttgtatttttagtagtgatggggtttcaccctgttggccaggctggtctcaaactcctgacatcaagggatccacccgcctcggcctcccaaagtgcagggattataggcgtgagccaccacacctggcctcaagttcacatcttcatccaaagcggcacaaacacacaac[187 bp omitted]cggtggcgggtgcctgtagtcccagctactcaggaggctgaggcaggagaatggcatgaacccgggaggcggagcttgcagtgagccgagatagcgccattgcactccagcctgggcgacagagcaagactctgcctcaaaaaaaaaaaaaaaaaaaaaaagaaccatacccctaagatgccaccctacagcaagagtatgccaagagactttgtccaatgtcactcagggacacctgtgcccctacaggcactaacccatctccctcactcttcctgggcaccacagacattctcaagtcccccctggatggggggcccgggctgtggcaaagggacacagtgcaagaatatggcgaccaagtacggcttctgccatgtggggctggaccagctactgagacaggaggctcaaaggagcacgcagcggggccggcagatccgtgacatcacgctgcaggggctcctggtgcccgcggtaggagctcatgggaggggttagggcggaaggggtaccttgggacaaccacccaccaggagggctcacgggacccagaaggttgcaacttcccatgtggccattgccttgctgcactgaaccttcatttccttatctgtgaaaaggggagatcccatcaaaaggccgtaggggtctggcccagtggctcacgcctgtaattccagcactttgggaggccaaggcaggtgggtcacctgagttcgggagttcaagagcagcctgaccaacatggagaaatcccatctctactaaaaatacaaaattagccgggcatggtggcgcatacctgtaatcccagctactcaggaggctgaggcaggagaatcacttgaacccgggaggcggaggttgtggtgagctgagatcatgccattacactactccagcctgggcaacaagaggaaaaccccgtctaaaaaaaaaaaaaaatcactcactagggaagcgctcactgtttggtgaaatggagggtgccccattcatgaattgcaaataaagatcaatttgagctaaaaaaaatcactcaaggacaggcacagtggctcacgcctgtattcccaacactttgggaggccaaggtctgagcattgcttgagcccaggagtttgagaccagcctgggcaacatagcaagccctgtctcttaaaaaaaataaatttatttatttgagatggagtttcactcttgtcgtccaggctgcagtgcaatggcgtgatctcggctcactgcaacctccacctccctggttcaagcgattctcctgcctcagcctcccaagtagctgggattacaggcacacaccaccatgccctgctaatttctgtatttttagtagaaacagggtttcaccatgttgcccaggctggtcttgaactcctgacgtcaggtgattcactcgcctcggcctcctaaagtgctgggattacaggcatgagccactgtgcctggactaaattatccattaactaatttatttattgacacgagtctcactctcttaccccaggctggacagcaatggcatgatttcggctcactgtaacttctgcctcccgagtttaagtgattctcatgcctcagcctcttgagtagctgggactacatgcgtgcgccaccatgcccagctaatttttgtatttttagtagagatggggtttccccatattgcccaaactgctcttgaactcctgatgtcaagtgatccacccaccttggcctcccaaagtgcaaggatgacaggtgtgagccaccgtgcctggtcaaaacaataaatttttgtttgtttgtttgtttgttttttgagacggagtcactgtgtcgcccaggctggagtgcagtggcccaatctcgactcactgcaagctccacctcccgggttcacgccattctcctgccgcagcctcctgagtagctgggactacaggcgcccgccac[139 bp omitted]acattttaaaaagttagctggtactgcaggaaaaaggcatataataaaaatgaaccaagaaaaattttaaaagaaaaaatttagctgggcatggtggcatgaatctatattccagctacctggaggctgaagtgagaggattccttgagcccaggaagtcgaggctgcagtgagccgtgactgcaccactgctctccagccgggaagacagagcaagaccctgtctcacccaggcgcggtggctcatacctataatcccagcactttggaggccaagacgggtggatcacgaggtcaggagttcgagaccagcctggccaacgtggtgaagcctcttctctactgaaaatacagaaattatccgggcatggtggtaggcgcctataatcccagctactcgggagcctgaggcagtagaatcgcttgaacccgggagatggaggttgcggtgagccgagatcatgctactgcactccagcctgggcaatagacccagactcagttaaaaaaaaaaaaaaaaaaaaggctgagtgcagtggctcacgcctgtaatcccaacactttaggaggccaaggcgggtgaatcacttgaggtcaggagttcaagaccagcctggccaacatggtgaaaccccatttctactaaaagtacaaacaaacaaacaaaaaatcaaaattagctgggcatggtggcatgcacctgtaatccccagctactcgggaggctgaggcaggagaatcgcttggacccgggaggtggaggttgcagtgggctgagctcacaccattgcactccagcctgggcaacagagcgagagtctgtctcaagaaaataaaaaatggctaggtgtggtggctcatgcctgtactcccagcactttgggaggccggatcacctgaggccaggagttcgagaccagcctggccaacatatagtgaaaccccgtctctactaaaaaatacaaaaattagctgggcatgatggtgcacacctgcaatcccagctacttgggaagctgaggaaagaggatcgcttcaaccccggacgcggaggttgcagtgagctgagattgtgccactgcactccagcctgggcaacagagtgagactccatctctttaaaaaacaaaaacaaaccaaaaaaatcactcaacagaattagctagtatttatttcctttgtcaccccgtgaagccacttcctcacccgaaaaatgaaggggaccccagtacctgcctcataacatggtgatgattaaggtacaagcccagcactggcatgcctccttttcagaagcaggtttttgttttgttttgttttgctttgtttgaggagtctcactctgttacccaggccggagtgccatggcaccgtctttgctcactgcagcctctgcctcccgggttcaagtgatttttgtgccttagtctctcgggtagctgggattacaggtgtgcaccaccatgcctggctaatttttgtatttttcgtggagacagggtttcaccatgttggccaggctggtcttgaactcctgacctcaggtgatctgcccgcctcagcctctcagagtgctaggattacaggcatgagccactgctcccagcgtagtttttggatttttagtagagacagggtttcaccatgttggccaggctggtcttgaactcctgacctcaggtggtccatctactttggcctcccaaagtgttgggattagaggcgtgagccaccgcacccagtgaagaagcaatttctttagagcattgtagcagactcagaatccagggcgccaagcagggtatagtcaccctgtcttcacctaaagtccagatggaggaatagaacttgacagggagagccaccttagaaactgatctccccagggtgattcggcggggaaagaagggctcccgggtgctgaattcacccactcccttcccagggcatcatcccagatatggtcagtgacaacatgttgtcccgcccggagagccggggcttcctcatcgatggctttccccaggaggtgaagcaggccatggagtttgagcgcatcgtgagtggccctgaagtgtgggtgtgggtgtgtgcgtgtctgtgtgcatgtgtggaggtgtgaggccatccctccccgcccaccttggataaggctgcacagactagagataagaaaggctgagatacaaggagagaggagatgctgagagggaaatggagtttttttgttatttatttatttatttatttatttatttatttattttttaggcagagtctccttctgtcgcccaggctggagtgcaatggtgcaatcttggttcaccacaacctctgcctcctgggttcaagcgatcctcgtgcctcagcctcctgagtagctgggactacagtaagcacccgccaccacgcagggctaatttttgtatttttggtagagatggggtttcatcatgttggccacactggtcttgaactcctgacctcaagtgatttgcctgcctcggcctcctaaagtactgagattacaggcgtgagccaccatgccggcctgttttttttgggtgttgaggacagggtctcactctgttgcccagtctggagtgctgtggtgcgatcatagctcactgcagcattaaactcctcccacttcagccccccaagtacctaatttttttttttttctttaagacagagtctctctctgttgcccaggctggagtgcaatggcgtgatctcggctcacggcaacctctgcctcccgggttcaagcgattctcctgccttagccccctgagtagttgggattacaggtgcctgccaccacacccggctaatttttttttttttttttttttttttttgtatttttagtagagacagggttttctccatgttggccaggctggtctcgaactcctgacctcaggtgatccacccacctcggcctcccaaagtgcttggattataggcatgagccaccgtgcccagccaagtaccttttttgtttgtttgtttgtttgtagacataggtttcctctatgttgctcaggctggtttctaactcctggcctcaagcaatccccccacttcaacctcccaatgtgccgggagtatgggcatgagaccctgcacctgcctgggaaacagagtgttctattatcaagggaaagtcagggtgttggaagtttctagaacccagatgaggagctagggagctctctgagggcagggaggaagtcatttcagtatcttcctgcccagttcctggcatgtggtgggtgaaccatttgcccactgaatagcgtgtgggtttagcatcctccctaggccatagagagagattcgtgttgttcattcatctgtttatgcaaccacctgtccccgaagtgttcttagagaaagccctgccctcggggctggggatacagagtttacaagatgccgacatcagagtgagaaagagaggcacgaagtcatgcaaaacaaagacatttctgggctgggcgcagcggctcatgcctgtaatcccagcattttgggagtccgaggtgggtggatcacctgaggtcgggagtttgagaccagcctggcgaacatggtgaaaccccctctctactaaaaatacaaaaaaaattagccagtcacggtggtgcgcgcctgtaatcccagctactggggaggctgagctacgaggatcacttgaacccgggaggtggaggttgcagtgagctgagattgtgtcactgcactccagcttggtgacagatggagactctgtctcaaaacaaacaaacaaataaaacctacaaagacatttataatagcagttaagtgcggcgaagaacagaaaacagaatgacatttgggaggaacgagagtgtgctcttttgggctgggtgggctgggtgggctggatggtggcctccctgacgtggatacactggggccctgagtggaggatgaggagctggtgctgggaaggttggagggaatttcttcaggtgattttcacacttccgcgtggcttttgtgcaagcagctgtctgaacacgtgaacagtgacgatactgtggactgaacaaggagggatctttttgattctgtttggaaacagttgagcaggaaaagagaggccgggtgcagtggctcacgcctgtaatcccaggactttgggaggccaaggagggcagatcgcttgagcccaggagttcgagaccagcctgggcaacataacaagacctctgtgtctacaaaaaaaatttaaaaatgagccaggcgtggtggtgcatgcctgtagtcccagctatttaggaggctgaggtgggagaatcacttgagcccaggaagtcaatgctacagtgagatataattacaccactgcactccagcctgggtgacagagcaagacactgtctctaaacaaacaaacaaaacataaaaaaacaggaaggaaaagagaagagaaactgtctgtcaggctacagaccttgaggcttctctgaggcttgttggattccacttaaaatacctttcgattccagaccagcctgaccaacatggagaaatcctaactctactaaaaatacaaaattagccaggcatggtggcgcatgcctgaaatcccagctacttgggagactgaggcaggagaatggcttgaacccgggaggcggaggttgtagtgagccaagactgcacccttgcactccagcctgggcaacaagagcgaaactccgtctcaaaaaaaaaaaaaaaaccttttgaagaagcactttgatggaatcaaaggtcatgggcgccagggcagctgttcccacatgcaggtgggggccctgccctttgttcacacctacattcaaggaattctgttgggctcataattcgttgtgatggggttaaaggacaaatctcaggcccccgcctcaggactgggagttctccgagggcaaaggtcgggctcattcatttctatgcctgccccagcctcaggccagtgcccggaagaaagcaggtccccagctccaccagtggcttctaggtctcagaacagaggctacagaccgtggcatgggcccctttgggtccaccaaagtgttcggtttggactttacagcattttgcattttcctttttgggttcacggccaacattcgacaacagggagcttccacatcaaaactcccagcttctcttgaaaaccgactgacttggcaacgcagggcctgcacgtccccatggcaacagctgcgtgaacgcttcctgagcttttattgagcccagcactgttctcaacactctgcatggatgaactcatcttccggaacgttccaggcattagcatcccgatgttttgcagagcgatcggggagctgcaatagggtcacacaatgtaggtggggaaggcagggcagaagcccaggcaaccccactccttgg[138 bp omitted]tggccaacatggtgaaacctcgtctctactaaaatacaaaaattagccgggcgtgatggtgagcgcctgtaatcccagctactcctgaggctaaggcag[136 bp omitted]tgtaatcccagctactcaggaggctgaagcaggagaatctcttgaacctgggaggcggaggttgcagtgagcagagatcgcatcactgcactccagcctgggtgacagagcaagactctgtctcaaaaaataaataaataaataaataaataaataaataaatagggtcttgctgtgttgcccaggctggtcctgaactcctggcctcaagctcccacctcagcctcccaaagttctgggattacaggcgtgagccaccacgcccagcctccaaggccccaattttaattcctttactgtgcaactgactttgtcacggtcactcctagaggcatttgagtctgcagtgtccctgccttagagtctgtccagaggttcctagtagcacagcatccctggagcctgaaacacagaccatgcctagccccatctgggaccccagctggctcatgcgtctttgtttggtgcattttggtgaagcaggtctggcttgatgatggatccccaggatggagatctctatgcacaagaacacaatgtgcaggaagggtgtggtgattccccttatgattcccactgtcctgtatactccagacaccatggggggccgtcctgggtgaacccactgaaatccatgggaagccaaggttggacacagcctcagcattccagggagactctcgcccctattttacagatggggaaaccaaggcccaaggaggaagggttgcctcctcttaatttttagggctgggtgaggtggctcatgcctgtaatcccagcattttgggaggcagacgcgggtggattgcttgagcccagaagttccagaccagcctgggcaacacgacaaaaccccatctgtacaaaaaaaaaaaaaaaaatacaaaaaaattagctaggtgcagtggcaagcacctgtggtcccagctactagggaggctgaggtgggagaactgcttgagaaccaggagcgttcagtgagctgagaatgcaccacagcactccagccagagcgacaggagtgaaaccctgtttcaaaataaataaataaataaaataagtggttttttttttttttttttctgagagaagtctcgctcttgcccccaggtctgagtgcaatggcttgatctcggctcactgcaacctccacctcccgggttcaaacaattcttctgcctctgcctcccaagtagctgggattaatgcacctgcgaccatgcctggctaatttttgtattttttgtagagatggggcttcaccatgttgggcaggctgttctcgaactcctgacctcaggtgatccgcccgtctcggcctcccaaagtgctgggattacaagtgtgagccaccgtgcccagccataaagtatgtattttttaaaacctttttattaattatagactcacaaggaaatgctgagatag[137 bp omitted]tcctgggttcacgccattctgctgcctcagcctccccagcagctgggactacagacacccgccaccacacctggctaatttttttgtatttttagtacagacggg[148 bp omitted]ggttggagtgcagtggtgcgatctcagctcactgcaacctccgcctaccgagttcaagcgattctcctgcctcagtctcccgagtagctgggactacaggcatgtgccaccatgcctggctaacttttgtattttagtagagagggggtttcgc[139 bp omitted]tcccgctttatttttattttttatttttttttgtcacccaggctggagtgcaatggcaccatctcagctcaccgcaacttctgcctcccaggttcaagcaattctcctgcctcagcctcctgagtagctgagattacaggcgcccaccatcatgcctggctaaattttatatttttagtacagatggggtttcaccatgttggccaggctggtctcgaactcctgacctcaggtgatccacccaccttggcctcttaaagtgcttggattacaggtgtgagccaccacgcccggcctaaactcccactttttacatttcttgctcagtcctggaatgggtcttttccagaagcccttttcgtggtgcaaaattagggttcaaagaatactcgttgctattgggttgtcatcgtttctggatcttcccagtgaacagagctaagaaacacatactcttgaaagagaaaaagaaatcacaagttcattctgatatttcacgttcacgtgacacttacagtgttgttccttcccttttctctttccctaaaaattttggttcttaataccactaacatactcatttgcatcataccattagataccaaatagtttgaaaacaatatgccaacattaactactaagaataaaactatatgtgttgaaacatcactatgtaccctatacacatgtacaattattgggtcaaaacaataaataaaagaataaaattagaaaaggaagtttaagatttctttatagctctcattttcctttattattattatttatttattttagttttcttttttgagacagagtcttgtcctttgtccaggctggagtgcagtggcatgatctcggctcactgcaacctctgcctcccaggttcaagcgatctctggataatttttgtatttttaatagaaatgggatttcgtcat[139 bp omitted]attggttccaggatctgtctcagataccaaaatccatggatgctgaagtttttttgtttgtttgtttttgagacagggtctcgctctgtcgccaggctggagtgtagtggcgtgatctcttctcactacaacctccgcatcccgggttcaagcaattctcctgcctcagcctcctgagtagctgggattataagcatgtggcaccatgcccggctaattttgtatttttagtagagacagggtttct[137 bp omitted]ccaggtacggtaatcacacctgtaatcccagcactttgggaggccgaagtgggagctcaggagtttgaggccggcctgggcaacatagtgagaccccatctctaaataaattacatattcaaagagttaaataataaaatagcatagtatttgcatagaacctatgatcaccctctcatatactgtaagtcatctctagattacttgtaatacctaaaacaatgtaaatgttatgtaaatagttgttatagtgtattgcttagggaataatgacaaggaaaaaattctgggctgggcaaggtggcccacgcctgtggtcccagctactcaggagagtgaggtgagatcgcttgagcccaggagtttgaggctacagtgagctatgattgcgccactgtacttcagcaagaccctgtctcaaacaaataaaaaaaagaattttattttggacattgtgaggtatggggaaaaaaaccagaccctgtcttaaaaaaaaaaaaaaaaagtctatacatgttcaatacagaggcaacttgttttccaaatattttcttttcttttttcttttttgagacagaatttcccttttgttgcccaggctggagcgcaatggcgcgatctcggctcactgcaacctccgcctcctgggttcaagcgattctcctgcctcagcatcccgagtagctgagattactaccacacccggctaattttttgtatttttagtagagatggggtttcaccatgttggccaggctggtctcgaactcctggcctcaagtgatctgcccaccttgtcctcccaaagtgctgagattacaagcgtgagctactgcgcccggcatccaaatattttcagtctgaggttagttgaattcacagatgcagaactcacgcatatggaggaccaactctatcccactatagatgcaccataataaaaatacagggttggccaggcaaccctacataatgaaacctaactgaaacaaatgacccaactatgtatctattgcattccttaattacacagaaaatatatatatatatctttttatatggagtcttgctctgtcactcaggctggagtgcaatggcacaatctgggctcactgcaacctccgcttcctgggttcaagcgattctcctgcctcagcctcccaagtagctgggattaaaggcacgcaccaccacacccagctaattttgtatttttagtagagatggggtttcaccat[139 bp omitted]ccccccactcagaaggctgaggcgggaggatcacttgagttgggtagttcaaggccccagtgagctatggtcacgccactgcactctatctagcctgggtgacaaaagtagaccttgtctgaaaaaaacccaaaaacccataaccagcattcacaagaggtttgggcacagatacaacaatggttagacctggctgtctggggattcctcacgctatcctcttctgtgtgcgtttgcagtatttcattacatcaacttcttttctctgttgtccagactggagtgcagtggtgtcatcttggctcactgaaatctctgcttcctgggtcaagcgattctcctgcttcagtctcctgagtagctgggtctgcaggcgtgcaccaccatgccaggataatttttatatttttaatagagacggggtttcaccatgttggccaggctggtctcaaactcgtgacctcaaacgatctgcccgcctcggcctccctaagtgctgggatgacaggcctgagccaccatgccagcctgtttttttgttttttttaactttgccatatatccatccagaatatctcacatcagtgtcaagagatattccttgtttctttttttacagctgtgtagtattccattgtgtggccacgccattgtatattcagctaatctcctatgggcaataaattactttcaatcctttgccactacagacaatgccacattaaataataacctttgcatgtcatttcacctttttgctagtatccttgaaatagattaggagtggaattgctggattaaagagaaatgcataattttgctagccatcaccagattcctcttcattttacatttacagtgagacctacagaacatgctgccaaggttttggatttttgtcaacctgtgtaggtgagaagtggtatttcagtgtggttgtaatgagcatttctctggctacaattgagttttaatatcttttgcaaagtttaagggccaagctgggcacagggacacatacctgtagtcctagctattcaggaggctgaggtgggagatcgcttgagcccaggagttcagggctgcagtgagctatgatcttgccactacactccagcccaggcaacagagtgagaccctgtctctaaaaatacaaaaagtttgaaaggtgttttgttgtcttcttcagtaaactctttctctctctctctctctctatatatatatatatatatattttttttttttttctgacaggttgttggctttttcctttcttcttttcttttctttttttttgaggcagagtcttgctgtgttgcccaggctggagtgcagtggtgtgatctctgctcactgcaacctctgcctcccgggttcaagcgattctcctgcttcagcctcccgagttgctgggactataggcgtgcaccaccacgcccggataattttcgtatttttagtagagatggggtttcactgtg[135 bp omitted]gtttgggaagactcagctcctttataatgttgagtctttctatccaagaatatatatctgatccttctgtgcaagtatccttttgagtcacttaagaatattttactttttaggctgggcgcggtggctcatgcctgtaatcccagcactttgggaggctgaggtgggcagatcacctgagctcaggagttcgagactaccctggccaacatggcgaaaccccgttcctactaaaaatacaaaaattagctgggcgtggtggtggctgcctgtaatcccagctacttgggaagctgaggcaggagaattgcttgaacctgggagacggaggttgcggcgagccgagatcgcgccaccgcactccagcctggttgacagagcaagactctgtttcaaggaaaaaaaaaaaaaaaagaggaggaaaaaagtattagaaccatatttgcttgcagtgtgcatgcctcatagctttcgaaggagacacaggagcaggtaactaggctgcctccagggagagtgaccctgggtggttggagatggcgagatgcttcactgtgtgtgtgtgtgtgtttggcagtgaatgtcctgtcctctccaaaaagtaaatacgtaaaacttgagctagaaaaataaaacaaggttgggcatggtggctcacgcctataatcccagcactgtgggaggccaagacgggaggatcacctgaggttaggagttcgagactagcctgaccaacatggcaaaatcccgtctctactaaaagtacaaaaatcagctgggtgtggtggtgtgcacctgtaatgccagctacttgggaggctgagccaggagaattgcttgaacctgggaggaggtggttgccgtgagctgagatcgtgctattgcactccagcctgtgcgacagagtgggactccatctcaataaataaataaataaataaataaataaataaataaataaataaaacagaccagggtggcctgattattccttacgtgcccaaataaataaataaataaataaataaataaataaataaaacagaccagggtggcctgattatttcttacctgcccacgtaatcctagatacctggtttctggggaagccggggttctggagccactgtgcctggtccctccacacccagcccccttgttcgggttcctaggtgggccaggcccccagcgtcgtcatcgtgtttgactgctccatggagacgatgctccgacgagtgctacactggggccaggtggagcaccgggcagacgactcggagctggccatccaccagcgcttggacacgcactataccttgtgtgagccggtcttgacctaccagcgcaataacctgctctgaaacgtaggtgctccccgcttctggctcactgcaccccaacccctagggaacaagtctggctttaacagtccagggtcacccgggcctggtcctcgctttcctaccaggtaacctgggggattcccattcccccaggaaatgccttgagaacccagccttggctcacgtgggaaggcaatgggacactggtggggcctccctgcacgccctcacacagcagtcagcaacacaagctttcctgaccctgtcccctctcccttcacgtgcatgcctctgggattttcccagggtctgagcgggagagggtggtgtccctgccgtggggcccagacctgacccctgcggctcccctttctctagatcccggcagaagcagcaccagagaacatctttgccaagtgctgctctgtcattgagagtctgcagtgagacagaggggctgggggtgggccttgcccctcaccggaacccgtgcagtacgtgggaagggtgcgtacctaggaggtgagacctccagaaagggggaccgatgccccctgtgattccagagcaacaggttccctttcccggggtctgtttccccaccagggaggttggccaggggccaccaaggaacatgccccactgggccaggtgcctggcacacctgcatgggtcaggggactgtcaacagccccccctagaggccacagctgttactggctcctgccggggctatcaccaggcccatgagcccaggacatctaagatgaagcgagttttaaacgctggcattcagccacaacctcagagaccctgcagctgcatgcggggctgcaagacacctgcccaggtccaaacagcttgggtggcccctcggtgccctctcccacctcacatccggtcccatcacccagcgagcactgacgcgggcctggctcccacctcagggctctgaacgttaacaggccagaggacctcctgtagcaacagcccatccatgggaacgccggtccctgaggccctcctgagcgccttgctccccaaggtgctggagggaaactgggtaggggaagacagcagtgctgggctcagccagcctccccttcccacatgggaaggggaaagtcttggggggccacaccccactctaattggctgagacttgctcaacttgtttcctctcacaaacacaactgcggccagcacgcagtcttttttaaacaaaaagcactttatttaacaaaaaaaaaaaaggggggggggcacggttaggaaagcacattgagcctgaagaaaactattttatatttttcttaaaaaaaaaaaaacacaaagtttgtaaatttcaatcaccattatcaggctttttaaacaacatctataaagaacaaacatccgcttcaaaactacagggagggaaggaaagggggggagacagacagcacccgcagacggggaggttttgttatcatttatttgtgaagttaaaaacgagcgataaaaagtaaaaactgccatacaattttttttgttgttctcattttgttttcagtttcaatctcctcttgaacagatgaaaagacaacagaccagtcctgggaggggggacgggcggggccgcgggagctgagccagggcgggagggagagaagagggggcttggctgctgggggaaggggtcctgcaatacaacacctggtccaaggaatgttccacctctaactaaaaaaaagaaatagcaagagtgacttttttttttcctttttaaaagtttattttaaaaacaagagggccgagggtgggagaaaatgaattgctttatcctcagagaggcaggttcaggaaggctggggggtgaagaatagagactttttaatatatatatatataattttataagttctgctttgctctttgtgtttttaatttttaagtttttttttttttttggcagagatttagatctcgctatcttctctggctggctcaacatggaaggatcccaattttgaaagaaaaagcatgtgagacacagaacaggcgagagagtgagggcccggcatgcccccaagtcccccccaccctgcttgccgcgagggctccccagtactccccacggcagccatcgctctctcgccaaacaaaacagaagcccccaaacagaacaaaatggaaaaaaaaaagatttttcacagatgaagaagttcacattcattcgattcattgagcctgcggagagggaagagataggaattggtcactacggggagggaagggtgggagactagggggcggaagagaggaggggctggaacaccgtggggggggccaggaagccccctcccaaacctgcgctggctcaggctggaaggacgtgcttgttaactgtctagccaggtgctcgcgggactcgctgaagtcacgctgctccctgatggagaaggagggacagagcaggaagagaggagaggggccgcggagggcggaggcgctagggtcgtaggggagctgccctgtctccggagggcggtggctcccggcgcagcacgacgacatgaacaatccagagatcatggtgtccccacaacacccctgtgaggtaggttggaaggtggcaacgatcttcacgcccacttcacagacaagcccgggacacaggcaagcgcgagcgcatgggaggctgagcccggcggggcaggggcctgggccgctccccgcgtccccaccagtccctgccagagccaggccgcctgcaacacagtcacttggacacaggaaaaaagatcatgggtttaaaaaataaaagaataaaaagaacaaaaaccaaaaaagtgatgcagagaaggggaaaaaatagacgttttcttcccaagtggccagattgtgagcgaggtggtggcggccgggccggtgcccaccgtccgcgctgtctgcctgccccccgactccccagcagttcagaagtcccgcctgcgagtctcagcgctccccagcatcacgacagcggcacacaggaacaagcagccggcgcagggaggcctcttcgtttaacctctggacccagcgaatgcttccctggcggtgcgtggggactcccggagacctccggccacacggcccccgctgcaggcatcaagggcacaccccgcaggggaaggggtttccggcgctacccactaaggcaggatggacggtggccgggggttggaaggagaaaggaggaggaggagggtggcaattcccacttgcctgctgctgtccctgctgcgtgggcggcggctgggggccgccaggacctggggtctgtccgtagtaagcggcctgctgtctgtaatattccgcccaggcggcactgtagtctggctgggagcctgggggagctcctggaccccctccggtggccacttgcgctgtgggtggacaaaggcaggtgagaggctgtgggtgagggctgcccctgcccctgtccccgcatggtggccactcaccttgcttcttgtagtactcctcccaagccttcgtgtagtcctgctgtgggggtgctccgggctgctggggctgctggcctgtgcgggcgccgagacaggtcagaaaccactcccccggcagggctggagcccccccgccaccctgcagactcaccgatctttttgtaatactcttcccaggccttagtgtagtccgactggccggtgggtgggggctgagggggctcaccctgagccggtggggccgcaggggccggtgcggggccggggacggggcccgggggctgctggtagtagtgtgagtagtaggcggcccacgcggcgttggggtccgcggccgctgcagctgctttgcctgcaggagatacctcgggtgagacggggggacagaacagggcctgccctccgccaggtggcccatcacttacttgggtcatgaggagcaggcggctgccactgggggtaggtattgccccagccctggggtgggtactggtgaggagggggccccccggcactgcaggagagaagaaagggatgcttgagcagtggtgcgggggtggccgcagccggaccacctggggtggggatgtttttcagtggggaggcgccagagacccagaccaccaggctcaacggggcgcctgggaaaggcctagacaagaagcaactcgaaggacgcgcagcgtcagcttgaggacatgaaagaagccgcgaaacttgcacgtgcacagagggatgctgaaaggcacatgctctaccagtagacaggagagggcctgttgatggtatccacaaaaatgggctggatgaggccccccgcctgcacttctagggaaagggaaatggggtctgctattcttcttgccagctcagtaagcccccggcctcaaaacccaggaggcagaggatactcactgtgggggagccccgggtggcccctggttgaagggcccaggattgaagggccccattgggccagcagggcctgggccacctgggcctggtccaactgggcagagaggaccctagaaggaaggagagtaaccaaggtaagtgggctgggatccgggctgtgagaccaaatccccagagcccgccccaacccacctcgatcttttcctcgataagctgcttggcgtggtcaatctgctggggtgaaccccggatgatgaacaacttgaagttggggtccccgttgggtggcagctgccgggagatctctacgaaggctcccgtctgctggtttatggctttcacattctcgccacctgcagaaacgcagaaggtgaaggtggcctgcagtgatggcccagggaagagggggcaagggatagggtgcagggggccacactcacctcggccgatgaccagcccacacttgtgagtggggatggagaaggtcatctccccgccagggggaccccaattgccttggcctcttcctcggcctcggccccccgggggcatgcctggaccccctggaggacctgggggaccactctgcaagacaagaggaggaggaggatgatgaaccctggaagccggtctggtcttgcactcccctggaggccctgccagccccttcagcacccggggccacctaccctgaggctctggaggaggtcgttgatgatccgggctgcgtgctcgcacctgtctgggggccccattatatgagcaatcttctcgggccctgtcccgtcatctgaggccagcaccgagagagcagagacacaagtttaaaagaagagcccaccccagagccctgcaacgccgcctccagcgcagacaccacgccggcctgagatctcagacgcgctgcgccgctcccagcctccactcgctcagggattgagggggaggcggcccacattcccagagaaggaaacccacggccaagccaggaggtggctcaagcttcttccagcacacagcacccccagcactgagagattttacagaacaataaatctctgaaaagccagaggggcccttctccccacggcaggcagctcagagactgcctgaggactggcaagagcccagagctgaggtggagtgccctgatccagcctgcggggcacccagggctgtcctgtcaggataggctccatcgtagggggaggaagaggagatctgatagggataggaacacacgttccccctggatgtggaaagccctcatgtgtctgtcccagagaagagaagggactggccatgttctgacggctggactaagagccgtgaggtgctatggaggccacctggctgaccacggtgcccagctccctcagagcctgcctcccaaagagggtgggggtgcactggccaggggcagggtgggccaggccctgaccttgcttgaactgtatccgcacgccagcatcattctggatcttcttgatcatctctccactccggccaatgaccacgccaacagaatgcctgggcactggcacctggggagggaggcagcagcgtcagctcggcccgcagctctgctgccctctgctgcccactggccacaaggagccactcaccccggcccctccctccactggcgggggagaggggggtgaaggcagggcccacactcacatcgatgcctccgccaatccgagatccgtactcattccggtccccaaagccgccttggtcacgttcccggaggatgtccatcaccatctcacaggcttgctgcaaacacacaggaagcagcccccatgggtgagccctgctgccccacacccccccacctcctcgggggtgcgggcctcaactaaggacccacgaaccctgggtgagcccagcacagcaccctactgagctctctacctgccactttaatggggaggcactaccagcagccccgtttccagataaaaaagcagaaggtcagaggtgaggccggtgcctcacacacacaaagctgggagtcagttcagggccatcctacgagccagcgctcttgcaagcctcttggtgttatgaccgactgttcacatatctctctggcggaatgcagaccccgagaccgctggccctgcccacctgcccgtgcctctccagaaccccctccaccaccccagggcgtgctcacctgcactttgtaaggatccccaatgatgcggagaggtttgtccacattcgtattctgagatccgtcctgaattaagatcatcttcactccagcgcgttcctttacaagcaaggttaaccgttagtgctgggctctcccaggacttcctgggctgctgtggtggtggcggtggggtgtggcacacggatgcagaggaagctgcccaggtgctgccctcacctgcagctgcttaatggtctccccgcccttgccaatgaccaggccggccttgcccgcggggatcatgatctcctgcacggtgccgttctggcccccgttggcgttgtcgtggaactgtcctggggggcccccacgaccccgagacacaatgtcatccagcatcatcttggctttcctgggaaggggaggagcgggggatgagcgggtgccaccgctggagaaaggtactggtctggtggcccacccagctcaaagggaaggcgaccccagagtgtgcaaggatgacagggaagaggggccagtcacaggggctgttcaggctccaggttccccaggtcttgggctgccggggaatcagcctcatgttaacatggctgtctggagatgggggcaagaatggaggacatggcgtgcaagttgctcccaactttcaattcaaacggacagagcaggcttctgcctgccccccacatcacaatgagaggccctgtggggacttactggacagattctggggctcctgtcaaggacacactgcgctcgggtaggccaccgctgtctgaaaagaggagatagagtcagtgccctccctggcccacaggcagagaaaggcctgccttggacacgaggaaactttcagaacaaccaagggccacttctgtcccattcagtgcctgacagatcagtttacttcccctaaacacctgggaggctgctcgatgcaaggccaaggttgggaagagatcccagaagggaggtaggactttaagggaaaaggatgaggtggagggagttgcagattccagaaggtccaggagccggccacccccactaccaatgatgaccagagccgcttctatagacaacacgtgctacacgcccaaggaagcctcagaaccccctacccagcaggctttctgtagctcaggactctgagattcgaaaggtaactacattgcctgagagcagatgtgcagccagaaccgggatttgctcctgggcctgacctcagagtgacccctctgtccaaggcaccaccctgtctcacgcagtcttgccggggtgctttcacccacgcggcaggtcagtgcagtgcgtcgaagctcggtgtctggaaccaggcccctgtgcgaaatgctagccctgccacctcagtccatacccacccactgaaaataaaaaaagtcacagctgtgccccgtgggcagtactagtggagtgagatactgcactgagcctggtccgtagtaagcaccaacaagcgccagctcgcttcctgtccacagtccccgtggaaattaagtaattaaaggaaagtgcaaagggcccaaccctggcccccactctggcaggaacctgacgctcttatacctggagaaatctgtactttgcagcctgaatcctgttggattttgttaatttgttcacctcctctgccaatgactggatggagaaagaaggagaaaagcaaagcgtgatgagggaagggagcccaggcctcaggagactgtgtggccggggccccagcccctctgacgttcaggagggcagcagtcctctagagagctcctgtcctctgcccagaggggacgaaggagggacaaatgagaacagcacataggagccctctcagaccagggcttctgggctggcaggagctcacaggacacttcctcctggggaagagtgggcctccccacccaaggtgacccacactcactcaggcccaccatgccgtctgggaccctgtactcttctgtcattgaagtcctgtaaagagacacgccaaaggtcagtcctcaagtgggaagggaggaggacagcagctctggaaggtctacttgaagccaaggccaccataggtctaagcagagtctgaccacacaggccacaaaactgccaaggcctcagtttccccatctgtgccccgagaggcttgctctgggcattgtgggccttggcctggtgccgtcccattgattcagggcgagagggagcactgagtagcaagctgacagtcactctatgtctctcagttctaaaaagctggctgtatgtccttttcatcttattttcctagtattttatgaaactactggcccattaaaaacaaacaaacaaaaaatgacccctgacaactgccctgtgtcaggttcacctcagtccatctggtggggcaaagaggtggcaaagagccctgagctccacagcactgagtgggatgggcacttgcagatgtgtgagggagggaagcaaggccctcctagcctcttccaggaagacgacatttgtgctgctcagagtccccaccccagcggaggaagccatagggtgcggagaccaccctatcactacagtgactgccacgacgctcccctcccacagcccttcagacaaggggtacgaggaacggacacagctcctctgcctcattcccgtctgagcactctggtcaactggcactgggggataaaacctgagagatgtgcccccagtcagagccctcccaagtcagcagaaaggccagtctgctggccaacagacaagaaagcagtgtgggccccaccatggcttaccttgggggaggatggatgggtccaagttgagaactgattgctgtagagagaaaacccaaagcaaagactggcttagctcctcctcgggcacttggcactgcctgccccgggtcagtgggagctgagcccggcaccacggtccccagcctgctccagtgcctcatggatgctgtggattcctccccataaaagcacagagctcatctccctcaatttcagggttcctgggatccctcaaacgtatgggccccagaatgaagcaccaggggcctctgtaaagagctgccacctcctcagtgcttccagctcctgactcctgaaaacctcaaccctctgaagccacatatctgccaccagaccccctggacttacagtctccctgggaagccagcttcttgctctccggttgatctgggaaagagagaggatggcagatgcagcacccacccacccacggccgcctcgaacctgatgctggtgccacatgtccaaggtaaacagtgcccctcggcccccacccttaacaggagctgagacaggagcccaggagagactggcccctgagggaggccagaccccgccaattccgccaccaacgctcagagtaaaaaagccttcagaacacgcaaccaccaccaggcacctgagtcctcccggtttaggacaggacctgcctctagcagggagggtgtcgtggataacagtggagttggtcagggttgatcatccgctacttggggtcacactacgcaccccagagctgggccaacttcacatcaagcctcagtaactgctccaggttgcctcagcctcccagaaagggaggaatcatcttgggaacttacaacttcgacccagtcacaatcaatctgccctcctctctgccacctgatacctcaggatggcagacggaacaagaagaattaacaaggccgggattgctgaggttttaaaagaccaaacaacagtgacacccaccccctctgaaccacactcaaacaaaagcacctctttaggcccccagcccttcctcctaagctaaaggcagcagcagggagttacctccatcttccaactgtctcttttggcccccaaaaccaaaatcaggagtgctgttattcactgtcgtggcagcatcgcctccaattttggctgcaatctagaataaagtagtaagcacagaagaattaccaccaaaaacaaccctccatggcacccaggtcaacttctcagaacatctcctggacacgaaagcccatcaggtcttggtgtctggccctccaacttagggaagagtcagttggttaagacatcctaggagttttgaacctaggcctcaaggttctcaccagttaactgggaatatcaaaattcccctcttcccttctcctgggatttgtgtcttaattgtggccagcccataatccacactgacttcgttctaggggtgacaaggaacagaggctcaggtgtcagggagggttcccaggtcatctccaagagctttcagacacttcctcctgccagtggccccagctcagaaaaccagaaagtgtgtttttttttagccccgttttcctgggatgctgaagagttcaattttcccctatctcccccactctcaaaatccttttatcaatttattgaataaatttgagcaaagcgatcacttcaagggatatgaaatcctcatttgaccaaaacagaagactctctggatggctgggcactgtgacttatgcctgtaatcccagcattttgggaggccgaggcgggcagatcacttgaactcaggagttcgagacagactggctgacatggtcaaactccatctctactaaaaatacaaaaattagctgggtgtggtggtgcacacttataatcccagctactcgggaggctgaggcaggaggagcacttcaactggagaggtggaggctgtggtgtgctgagatcgtgccactgcacccctgcctgggtgatattgagactgtttccaaaaaacaaacaaacaaacaaaaaaccaagactctatgggacacaagttacatctcagacacgtgaagagcaactttaaagaaacctcaacccagcaaacttaggatcagagtctggggtttagaaacccaaaccatgttaagaatctccctttccaccagtctccatttttctacgctgccctagagccaaaactcatgggatgcccacagggggcctgtccccaccaactgacagcaccagcttcctcccttcaagctgtcccagaatcagacggttccatgggcaataagaccaaatgcacgctagaacccacccaactccaagggtgagagagacgacagagggccagaacacaggcgttcacttaacgggacctcccaccttgggaggagccagtctctagccccggaggcattgggacagcccaggagccggtcggcggcaaagtcctcccattctaccgacccccacccctccaggccatggggaggctgcaaatggagctggagaggtcagtcctagcagcatgtgacacttccttgtcattacgcctcaatacacgggggtgggagaccctcccttctttcccccaaagagacagaccacgctttcaagccaccaaagcatccaagagccagtccccatgctcgtcttccccatttcgcccaagtgctcagccctagacaggtccccatccactttcccgactgaagaggaaggactgtccctcccacccccacaatgtccctttctcctagagaggggacagaaatgggactgggttgggggcaaacactgccctttgccctgatatggaggggagagtaaaggccctccgcccgggaaggtggacccctgcctccaggcatgtcctaaggccggggggctaaggggggggtcccaaaagtgcgtctccgagctccggggcgcctgcacacccaggcgccgctcctggtgacccccagtgcgcccctactccctgcaggggggtcacccgttgggatcccactcgaggcgcagcgggagggccaggcccccgcctaccgcccacgtgaccccgcgacggccccggcccccctccgcgaccctgcgcgcgcgcgcgcacgtgacccccgccccctcccccgcctgcgcgcgcgcgcgagcgcgcccctcaggccctcggcctcctcacctggcgggcccgctgcacggcgtcggcgaaagcgtccttgcggattcccgggccgcctccgccgggtggctgagaggggcccccggccgaccccccgcccgggccgccgccgccgggaccgccgccgccccggtcccccgcgcctggcgggcccggcggagggcctcccccggcgcctccggctcccccgcccccgccggcgggcggcggcggcccgggcgggggtcctcccgtgctgtagtccgacatggcgcggcggggccgggcctggcgcggaggctgaagctgaggaggcggcggcggcggcggcggctcaacgcgggaacaaggcctcgctccacacggccgcggagcactctgggaacccagccgctgggaggacgacgaggggggagagagtcgcccctcccgccgccgacgtgacggacgactccggcgggccaatgggaggcagccgccgcaccccggacaccaatcgcgagctctgtaggaggtggccaatcggagtgcaatgaggggcagtgggcgggaggctcagagtgactgacagctctcagaggcaatagctgcgagctgcccgtgctgggcgggcaaatgaaggagatctgagaaggcaggaggcccaatgaaacgcgagtgccagattcgcggggcggcttcagaattagattgacggttctgaagagtcacgtggactgtaaggccgggcctagtggaagactcctatggaccggctgggtgggcgttaggtttgatagtcgtggacacaagccaatgaatgcacgtgagaggtggtgcttgtaaagatgggcagccaattaatccaattcctgacgagttctgggtgatgaggttggctttggactttaattgcttcccttgttaaccagaatccttttctatccctgacttctaagccaatggctgagcgacatgggtgggtgttcggtgactgacactggtctggacaaatgggaatgaaggaaatcaaagcgcccacttttggtgggagccagtggaagcgccgctgcattggggcggagtcggccaccagacagcgaggggattagcgggaactgtagtgaatggcagccgacgtgggcggtggcaatcggctgcccgaactcaggcctgatgtctgggttagctcaccggcagcctggttgggtaggcccggcacgtggcccgcttgaagccttagagatcgagcgcttccggaggtggggaggccggaaagcaggaaactcgggatcccccgggccttcttctctctcgaccccccatctagagcgtccagttctcttgcaggactcaaggaaccagccccactcacgagtccagaaccgttccaacaaccgggatcgagggatcacagcctcgatcacacccctcacttcacacccctcactcccttcgcctaaggccctgggatccaagcctcaagctcctatcctaggtcctcacttcctctcctggacacaaattcccattcaggacccagaggcccaaggtccccagctcccctactgggtccagggatctcatgcacccagttccactcctaggcccaagtatccagacacgttcagcaaaaaccatctctttattccttgttgtgtgacatgttcaccatttcgccctggagccaggacgacccacaaggggccagactggagtccacgtttcttgtctcaggctgcaccctggggagggagtcccaggagttttctgacccagcactgcccccctccacccaccaccaaccccagcttcaggaatcttctgacccagagccccacccccacccccagcctgcttttgccaccaaaaactgccccagggcctgaaccttgaggcctcgagggctctttggggccaggggtcatcaggtcctcctgtcccatttctgcctaggctgtgtcgtccagctcacagcctatatgcccagggttttcttcatggcttcgtacaccacatagctgatgccacctgctggtaagaccttcagtagcgtgggggtcatgcctcggtacagccctagccagccctgctgggccaggatccgctggaggactccgcgcatggtgggatttgagccctccacggtatctgcagggacacaggcaagatcaggactaggccagagatgaccgggcctcctaggagtctggaatgttgcggacaggtgctgaagccacgggtaggggccccaggggtcagtaggaaaacagtttgaagagtcttagaggaaattggtcagtttgaggaggagtgggggagtttctgagtagtagttatcaggattaattttaggaaattttcttgaggggtgggagtggggatagggtctctctctgttgcgcaggctggagtgtggaggcacgatcatagctcactgcagcctcgacctccagaactcaagggatcctccagcctcagcctcccaagtagctgggaccacaggtccatactaccatgcctggctaatttttatatatatatttttgagacgcagtctcaaaagttatcaaaagtgggctgggatcagacacggagggtgccggactcagttttggggtatgagaaaattgagacagccagggtggggcggggaaggggcatgcgtggtggccgctggggacaggctgaccttgggcctgcatcctggtgcgcaccagagtcagtgggtagctggccatctggccacaggtcgtggatagcgtcacagacgacagactgaccaggccactggggtcccccatatccctgcctgacttcacccagaagcactggagcatctgcaagagaagggggccaggagaaagctcactaggagcctgggctccggccagccctgccaccccctctgcaggacccatacctcatagacagccaggtcggtgcaggcataggggatgatgccgagcatattgggcaggtagccgcggtaaagggcgcgggtgccctctcgctgcaagatctgcctggcgcagtccagcagccccttgtactggcccgtccgacgcaaggtcaaccgcgtcttcagcacctgaggatggcggggaacaaggcagctcatttgattgaatcctgtcaatgaccctcggggtagccattgtccccaccctacaaacaaggaaaatgaggctcaggaaggcaaagagctgggtttcagacccggatctgtcagattccatggaatgctctctgaattttgagttctgaagcacaaatgctggcaaaggccaagagagtgagggaagaaggctcacgtctgtcttcccagccctttgggaggctgaggcgggaggatcgcttgaggccgggagttcgagaccagcctgggcaacatagcgagaccccatctttacaaaaaaatcaataaaataaaaataagatgtatatggaaacatcaacatgggagaacagcctggaaaactgattaagaataacagggaagggaggcgagaaaacatgccctcaagcctcaaaaattgaagacagctggcaaaactttatggcaaaaagatcaagcactggggggaaagaaagagagtgaataggtagaaaacagggccttcctagggcagtgaaactactccgtaagatactacaatggtggatacaagtcattatacattcctcaaaacccatagaactgttagattaagagtgaaccctaggtcgggtgcggtagctcatgcctgtaatcccagcactttgggaggccaaggtgggtggaacacttgaggtcaggagtttgagaccatcctgggcaacatggcgaaaccctgtctctactaaaaatacaaaaattagctgggtgtggtggcaggcagctgtaatcccagcaggagaatcgcttgaacccagaaggtggaggtcgcagtgagcagtgagtcaagatcgtgccactgcactccagcctgggtgacagagtgagactctcaaaaaaaaaaaaaagaaaaagaaagaaaaaaaggagggtttccggtccacagatgagaaatgaaaatatatatgtatacatatatatagtatatatacatattatatatgtattattatacattatgcatatattatatataacatgcatagacatatttttatattacatagtatataataaatgtaattatataattagatacattaaattatttagttatatataatatatacatgttatatgtactatatatttacataataagtaaggtatataatatatgtgtatattatatataaaacatatatatatatatattttttttgagacagggtctccctctatcacccaggctggagtgcagttgtgtcccatcatagctcactgcagcttcgaccttctgggctcaagtgctcctcccacctcagcctcctgagtagctgggactacaggcatgcgccaccacacctggctgatttttgttttcagtaaagatggggtcttgctatattgcccaggctggtctcaaactcctgggctcaagcaagcagtcctcccagctcagtctcccaaagtgttgggattacaggcatgagccaaggtgtctggcctgaaaatttatatatatatatataatatatatattatatatatgttatatatatatataatatatatattatatatatgttacatatatatataatatatatattatatatatgttatatatatatataatatatatattatatatataatatatatataatatatatatgttatatatataatatatatgttgtatataatatatacatatataaatttatgaaaatgttatatatatgtatatgtgttatatataatatattcatatataaatttatagaaaggaggaggagattggagaggaggagaaagaggtaaagggggaagagggagaggagggagaaaggaggagggagaaaggaaaggaagaggggaggagaagggagaaaggaagaggggaggagaagggagaaaggaggagggaaggaggaggaagaaaggaggggaggaggagaggaaagaggaggggaggaggagggagaaaggaggaggaggagaggaggaaggagaaaggaggaggaaagaggaggagggagaaaggaggaggggagacagaggaggaagaggtgaacggggaggagggagaagtgtgagaaaaaaggaggagaaaggaggaggggagaaaggaggaagaggaagtagccccagcaacgtgggtaactagtttccacggcgtttcctcacctgcggggcacatgctctcttacctccatggggttgatgagggtctgggagatggccacagccagggagccagcaaggagacgctcctggaagggcggggacccttgtattccacagaagtaattcttgcactgggagaggagagaggagggtgagagagaagtcagccaccctccgacacaaaacccgcgcagggaagaggcctggggtctggagggtgagtgtgtgcttgaacaagggcctggagttttgggggcatgggaggggtttgggcttgagctgggggaagcaggcccctcattccccacctgctcgaatacggagaacttgatggcatactcaggagcaatcttgagcacgttgatgccgttgccccgccacagggagcggaagccgccctcctggaccatgctctgtagcccccccagcaggttggtgaagttcgtcttggaggagtagacctgggtggagggaggaccctggaggagcccctgctcgcctctgtctccgtccccatccctgccccaagcgcagccccaccgggacctcccaagccacccaaccccaacccatccccatcccatccccattccttcttcagctccttccccggccagttctagaatcgcatgcaaccctgacccaaagccaacatcaacctacattcccacctcacccctcctcttcatctcctcagtctttttctctctctctttcttccttccatcctttcctttctttctccctttttgttccctccctccctcccttcctccgttcctcccttccttctttttttttttttttgacggagtctcactctgtcgcccaggctggagtgcggtcgggggatctcggctcactgcaacctccgcctcccaggttcaggcgattctcctgcctcagcctcccgagtagctgggattacaggctagtgtcaccacgcctggcttatttttgtatttttagtagagctgggggtttgccatgttggccaggctggtctggaactcctgacctcaggtgatctgcccaccttggccccccaaattgctgggattacaggcatcagccaccgcgcctggccttcttttccttttctttcttgtttttttgtttgtttatgttttcgagacaggatcttgttctgttgcccaggccggaatgcagtggtgcaatcacagctcactgcagccccaaactcctgggctcaagtgatcctcccacctcagccttccaagtagctgggactacaggtgcgtgctaccatggcaggctaattttgtaaaattttttgtatagatggggtcttactatgttgcccaggctggtctcaaactcttgggctcaagcgatcttcccactttggcctcccaaagtgctgggattacaggtgtgagtcaccatgcccgactcctttttaaatttttaattaattaattaattaattattattttgtagagatgtggtctgactatattgcccagctggtctcaaactcctaagctcaagtaatcctccctccttggcctcccaaagtgagccactgcacccgtttattttttcagccagggatctcgctctgtcacccaggctggagtttgtggcatgatcatggctcactgcagcctccaactcctgggctcaagcaatcctcctgcctcagcctcctgagcagctgagactatgggtgtgagatatcctgcttgaggtagctccagttctatgttgccttttttttttttctttcttttttgagacagagtctcactctgttgcccaggctggagtgcagtgatgcaatctcggctcactgcaacctccatctcctgggttcaagcaattctcctgcctcagcctcctatgtagctgggactacaggcacgcaccaccatgcccgactaatttttttgtatttttagtagagacagggtttcgccatgttggccaggctggtctcaaactcctgaccccagatgatctacctcccctgggcctcccaaagtgctggcattagaggcatgagccactgcacctggcccctaccttgtctttaaactcgtccaaagaccccatccccaattccctgacctccaacccccaccttggcccagcgttggtccctgtccctggcaagttctctcaactcctcaaactcgactccaagccatgtccacaccagctctatcaccatccacaacctcaatctcagctagtccaggagagcccaactccagccagcactcctatcctgaactccatccacgtcaactccatctgtcctcaccccacgttctccccagtggctccagcgctgggtcccgtcctccccccaacccacacaaacctgcatgtacaccttggctctgtccagaggtgccgtgcccgtgcgagacaccgccccggccatagctcctgagagtagaaacttccacaaggcctccttgttatccacttccaggacttccacggggaccatcagctgctctcctgtgtccagtacctgcagggcagacccggccctccctcatcctcagccaggttggggcaccttccccagacacacatctagggcacccacctggtgaaagacccaccctgttcccccaagtctgcatttttttttttcgagacggagtcttgctctgctgcccaggttagagtgcagtggcacaatctcagctcgttgcaacctccacctcccaggttcaagcagttcctgccgcagcctcctgagtagctgggattataggcatgcaccacaacacctaatttttttttttttttttttttttttttttagtagagatgggtttcactatgttggccaggctggtctctaactcctgacctcaagtgattcaaccctcccccctggtttttttttgttttgtttttgtttttttttagacagagtctcactctatcgcccaagctggagtacagtggtgcgatcttggctcactgcaaccgctgtccccctggttcaagcgattctcgtgtctcagcttcccaagtagggacaatggtgtgatctcggctcactgcaacctccgcctcctgggttcaagtgattctcttgcctcagcctccccagtagctgggattacagtgccaacgtgccgagcaaatttttgtattattttaatagaggcagggtttcaccatgttggccaggctggtcttgaactcctgacctcaggtgatccacctgcctcagcctcccaaagtgctgggattacaggtgtgagccaccacacccagccaatgtaatatagactctctaagttactcatggaggatccaaggaggaatacaaatgtaattaggactatatctagactcttaatttattcttattttttgagacagaatctcgctgtgttgctctggcttgagtgcagtgatgagatctgggctcactgcaacctctacctcctgagttcaagcgattctcctgcctcagcctcctgagtagctggtactacaggcgccaaccaccatgcctggctaagttttgtaattttagtagagatagggtttcggcatgttggccaggttggtcttgaactcctgtcctcaagtgacccatccacctcaacctcccaaagtgctgggattacatgtgtggagccatcgcgccctgcctccctgccccaccctgcttcaaggtggaattctaggtccgctagcaggggagtgggcctgtagagggcgtgggtagcctggcctctccctgtagtcctgaccagaggtgccgggacactggtgtttcctaaactcacctgctgtgacgggagatgttcaaggttgttgtcatgcatgtggccaaacgcgtacccatacacgtgtgtacagccagggttccaggatgggggtggaggcggaggttgggggggaggcggggctttgatgagtaaggtcttgaccctcctaaacagtgtctggatcctagagcaagtgttctgaggttccccaggctgagcgcccatggaggaagttaggacacctggcttcaaatccctaagcagttgtttgctgctccagctaccatgcgggagtgtctagtgggaggattgtgtgggggaccaagaggaggatgaagtcacaaacgcccctgtgaccttcctaggtgtggtgggcagcgtgatggcccccttcccccaagtatccacctcctgatcccccaaaccaataaatatgttatcgttataaattgaattgtgtcctgtcaaaattattattattatcgttttttttgagacggagtctcgctcagtctcccaggctggagtgcagtggcgctatcttggctcactgcaagctccgcctctggggttcacaccattctcctgcctcagcctcccgagtagctgggactacaggcatccgccac[184 bp omitted]ggaatttggagacagggcctttgggaggtcctcagggttagatgaactcatgaggatggcccctgcaagatggaattagttccctataaggaaaagacaaaccagagctctttctctctctctgtctgccatgggaggacgcagcaagaaggcatggcaggaagaaatccctcagcaggaactgagctagccagccaccttaaccttggatttcccagcctccagaaataaatgtctgcagtttaagaccccgctctttagtgtttccttatagcagcctgggctgacttacatttgttacatggcaaagggg[134 bp omitted]tgaaacccagtctctcctaaaaatacaaaaattagccaggtttggtggtgtgcccctgtaatctcagctactctggaggctgagacaggagaattgcttgaacccaggagacagaggttgcagtgggccgagattgagccattgcactgcagcctgggcaacagagcgagactccatctcaaacaaacaacaacaacaacaaaactttgctaggctgggcgccgtggctcattcctataatagcagcactttgggaggtcaaggcaggtggatcacttgagcccaggagttcaagaccaccctgggcaacatggccagacccctgtctctataaaaaatacaaaaattagctgggcatggtggtccatgcctgtggtcccagctacacaggaggctgaggtgggagggttgcttgagcttgggaggtggaggctgcagtgagctgagatcttgccactgaactccagcctgggtgacagagcgagaccctgtctcaaaaaaaaaaaaaagaaaaaaaaaaaaagaattaaggttgctaaacagctgatgggaaatggtctcactctgtcacccaggctggagtatagtggcacacttaaggtcaatccccttgacctctctgttcaggtggttctcccacttcagccacccgagtggctaggaacacaggtgcggacaccacgcccggctaagttttaaaaattatttttggctgggcgtggtggctcacacctgtaattctagcactttgggaggccaaggcaggtggatcacctgaggtcaggagtttgagaccagcctggccaacatgataaaaccccgtgtctactaaaaataacgaaaattagctgggtgtggtggtgcatacctgtaatcccagctactcaggaggctgaggcgggaggatcacttgagtccaggagttcaagaccagcctgggcagcaaagcaagaaatttttctacaaaaattttttaaaattagccaggtgtggtcatgtgcacctgtagtcccagctacttgggaggctgaagggggaggctcccttgagcacaggaattagaggctgcagtgagctatgattgtgccactgcactccagcctgggtgacagagtaagacccagtctctaaaaaacaaaaaaagtagtcaggcatggtggtgtgtgcctgtggtcccagctactccggaggctgagatgggagcatcacctgagcctgggagtttgaagctgcagtgagccatgattgcacccctgcattccagcctggggaggggacagagtgaaaccctgtttcaaaaaccaaaaccgaaaccaaacaaacaaacaaacaaaaaacctgacaaaatcatatacatgtaggtatatatgtattagccagctgttgccatgtgacgaattacccccccgccaaaggttggcagcttaacacaacaaacatttatcatctcacccatattctgagcattaggaactcaggagccgctgagccggctgttcccgtgatcagtgtttgaagtataagagtctaagattcaggattcaggtactgggatccagttgtttcggtggagggatccacaaagcttggactatccagggaattcaactgatagaattgcagtgagatgttggccaggacagcaagatcctcttccaagctcagttacatggctattggctgagttccttaccacatggtcctctccataaggctgctcatggcatgaccaccggcttcctccagagcaaatgttatgagaaagggggagagagagagagagagcatgtaaccaataaccaggatggcagcgacagtgtctttttttttttttctttgagacatagttttgctcttgttgcccaggctggagtgcagtggcacaatctcgactcactgcaacctctgccacccaggttcaagcaattctcctgcctcagcctcctgagtagctgggattataggtgcccgccaccacgtccggctaatttttgtacttctagtagagacggggttgccatgttggccaggctggtctcgaactcctgacctcaggtgattcacccgcctcggcctcccaaaatgctaggattatagacgtgagccactgcacccaatcttttatttttttattttttgagatggagtcttgctctgttacccaggctggagtgcaatggaccaatcttggctcactgcaacctccacctcctgggttcaagtgattgtcctgcctc[134 bp omitted]tgagctcaagtcatcctcccatctcagcctcctgagcagctggaactacaggtatatgccatcatgcccagctaattgaaaaattttttgtagaaatggggtctcactgtgttgcccaggctggtctcaaactcctggcctcaagcgatcctcccaccccgacctcccaaagtgctgggtttacagatatgagctaccccacccaccctgaattttctattttttccacaataaatttgaattactcattgtgggttgaactttgtcccccaaaaagatgtgttcaagccctaaccccagtaacctgcaaatgtgaccttatttggaaatacggtctttgtagatataatcaaattaaaatgaggttacactggattggggggggttgccctaatccgatgactgctgtccttacaagacatggaatcggccaggcgcagtggctcacgcctgtaatcccaacactttgggaggc[135 bp omitted]gaggcaggagaatggcatgaacccaggaggcggagcttgcagtgagccaagatcgcgccagtgcactccagcctaggcgacagagcaagactccatctcagaaaaaaaaaaaggccgggcgcggtggctcatgcctataatcccagcactttgggaggcatcctggctaacatggtgaaaccccatctctactaaaaatacaaaaaaaaaaaaaaattagctggctgtggtggcgggtgcctgtagtcccagctacttgggaggctgaggcaagagaatggcatgaacccgggaggcggagcttgcagtgagccga[131 bp omitted]aatgcaaaaattagccagttgtggtggtgtgcacctgtaatcccagctattctggaggctgaggcaggaggatcacttgaacccgggaagcggaggttgcagtgagctgagatcacgtcattgcactccagcctgggaaacagagcgaaactgcatctgaaaaaaaggatggaaatttgggcagagagacacagacacacataagggagcatacagtatgaagataggcaggcagtggagtgatgagtctatcataaaccaaggaacaccaaggaccatgtggctcacacctgtaatcccagcacgttgggaggctgaaggctggcgaattccttgaccccacgagttcgagatgagcctgggcaacatgatgaaatcctatttccacaaaaaagaagtaataataattaggccaggcacggtggctcacacctgtaatcccagcactttgggaggctgaggtaggcaaatcacctgaggtcaggagttcgagaccagcctggccaacacgggaatacctggtctctactaaaaatacaaaaattagccgggtgtggtggtgcgcacctgtaataccagctactctggaggctgaggcaggagaatcgcttgaacctggaaggcagaggttgcagtgatctgaaatcgagccactgtactccagcctgggaaacaagagcaagactcctatatcaaaaaaaacaaaaacaaaaaaccaaccaaccaaacaagaaattagccaggcatggtggcatatgcctgtggttctagctgctcgggaggctgaggtgggagaattgcttgaacctgggaggcagaggtggcagtgagccgagatcgtgtcactgcactacagcctgggcgacagagcgagactgcatcacaaacaaacaagcaagcacagaaacaaacaaaaagttgggcatggtggtggttgcctatagtcctagctacttgggaggctgaggtgggaggatcacttgagcccaggaggtgtaagctgcagtgagccgagatcgcaccactgcactccagcctgggtgacagagcgagaccctgtctcaaaaataaattagctggacataacggtgcgtgtgcctgcggtccctgtggtcccagatactcaggaggctgtggtgggaggatcgcttgagcacaggaattcgaggctgcagtcaggtacgattgtaccactaccctctaacctgggctgcagagtgagatcctatctctctctctctctcacacacacacacacacacacacacacacacacacagacacacaaattgttttaagccattctgtttgtgataatttggtctggcagccctaggaaaaggataatttgaaaaaaaattgaaatttgtaatttgaaaaaaaatacagaggccgggcgtggtggctcacgcctgtaatcccagcattttgggaggctgaggcaggtggatcacttgaggtcaggagttcgagaccagcctggccaacatggtaaaaccctgtctctcctaaaaatacaaaaaattagccgggcgtggtggtgggtgcctgtaatcccagctactcaggaggctgaggtaggagaatcgcttgaacccgggaggcagaggttgcagtgagctgagaccgtgccactgccctccagcctgggcaacagagtgagactccatctcaaaaataaataaataaataaaaataataaagcccagaaaatttagaaggggttataaacagggactccctcccctgctcccattttatagatgtgtaaactgaggctcaaagagggaatcatttcctggctcttggaactgtgggtgttgggaagcagccccttgtcccttccctaggggtagactaaggtggtcccatagccacccacccccttttcagtaaaaaccacaataaaagagcttagaaaatttattccttttgttcttttcctttgaaataacacacacaggcagggaggtggggcgcagtggaggtcgaaggaggtggaagcgtgcggaagtcctccagcccctccccaaatcccagttcccctttccaagtccctccatggggtctccagatgatcctaagctcagaatccaactatgaagtgcagaatgtaagggcgcaggggaggaggactttgctcctctctctggtagaaaaatagatctggaatgaatttggggatttggtggtttttttttgtttttgttttttgcatcattgggtgcttgggtttagggaagggtggtctttgccgattttctcctggctttcaactctggaagcctggggaggccctgatagtgctggggtggggacatcccttcatgtgtccctggcctcagactgtctccttgccagcctccaggagtgagtgattcctcggaccccttggaggaacacagctctggggactattcgcctagaaggtgggagggggatggaagatgctgtgaagtgtggggatgcagggagtggagtggttccagggaacagtttccccacagggctgggagggggtggccatgcagaggtggggtgagggggaatccagcatccgtgcaggttgcagccaggacctgggcttccttccccacagactccctcgaccatgcaatttcatgtcatgagaagccggctctgggcaccagtgtgtgtgggatactctgtgactgggctgccaggatctagacttggggcctgaacatttgggacccggcgcctggaagattcagatcagaaaccggggattcagggcttgggattcagtgccttggaatatcaggatctgccttcaagagatgaggtttcaacattgagggactgggcagagggattggggacccagaatctggaatccagcagctgcagttgccaggatccacttgctgtgccactggggcccccgcacttgttttaggagccagaatctggtgggtgaaggcttgggaatctgggatccagtgcctgggggtggaaggcgtagtgcttgaaatgcagggatctggcagtcagcagaaggatctgagacccagtgtcgaggttaaaaaaaaacaaaaaaccaaaaaccaatgcaggaatccagtgggtggagtgaggggatctgggatccagtgatgggggccccaggatccaggcattgtggttgtcaggatccagtggtgaggtttgttgacatccagaatccagcagctgagcttggagatccagggctcgaggcatggggatctggggttggggatctaggatccagcgtttcactaggacactggatctggtgcctgagggaggcagggtctgggtgttgaggtacagggaatccgtgctcctgtggttggggtgttgggatccattcactgatttgtgtgggatccagtggttaagacgtagaggtccaggatccagtagggggcacagggaagcgtgggatccaccttaggatgtggggctgcaggatccagtgatttgggggatggggattaagggctggggtgtggataatcttgaatcttgtggttagggtagcagacttgagttgctgaagtaagggatccacagttatggttacagggggatctgggatctagtggctgaagggtggggatcgcatgacccagtggttggggcataggagtctaggatccaggatctggatgctgggatcccatgacccaatggttggggcataggagtctaggatccaggatctgggtactgggatctcgtggccaaagagtagggatcctgtggttggatcatcagtctccagtggctgaggtgtggggggtgagggattggggggacgggctccgggtccctcacctggacgtgacccccaaggcctgcttcatgttctcgtagaccacataggagatgctcacagctggaataaccttcatgaagttgggggcgatcccccggtagaggccccgcatgccctcctgggacaggatgtgacgtagcagacccagcatggacagctgggggccaccctcgatggaggctgggagggggcggggggggcaccaggtaaggccaacgttcccctttcacttccccctcctacccccagggttgggccaggtggtgtcattgcagcaggagggaaggaggttagactaacagtgggacctaccactcagagtcgagacttgtattgaccttggaactggctgctcaccttttcgccccaagtttggggacaattagaaatggagcaggtatgggtgtgcaaggtgagaaaggacagaaatgtcctcctcctggagccaggttccctccctcctttcccagctgactcctactcatattcccaacccctatcccagagccagctccccaggggactcctccttggtgctccagtctaagtcaggctcctccctgccctccacccactttttgttttttagacggagtttcgctcttgttgcccaggctggagtgcaatggtgcaatctcggctcactgcaacctccgcctcccgggttcaagcaattctcctgcctcagcctgccaagtagccgggattacaggcatgcgccaccttgcccggctaatttttttgtatttatagtagagacggggtt[221 bp omitted]tcactcctgttgcccaggctggagtgcgatggcacgaacttggcttactgcaacctatgcctgctgggttcaagtgattctcctgcctcagcctctcgagtagctaagattacaggcgcctgctatcacacccggctaatttttgtattttcagtagagacaggatttagccatgttggtcaggctagtctcgaactcctgacctcaggtgatccacccacctaggcctcccaaggtgctgggatggcaggcgtgagccactacccctggctcccacccacttttttgagacagggtctcactctgtcacccaggctggagtgtggtggcataatcatagctcactgcagcctcaagtgatcctccggcctcagcctcccaagtagtttggactacaggcacctgccaccacgcctggctaatttatttcttcattttttaaaaaaagatggggtcttgctatgttgcccgggctggtctcaaactcctggactcaaatgatccttcctctttggcctcctaaagtgctgggattacagatgtgagccactgtgcccggcctccttctcccctttatacaaccctaaatcaatacttaattccagaatgatttatttagcatcttccttcctctccggcctgtgagctctatgagggtggggaccgtgtccgtcttgtacactgacacatctccagtgaaaatcacaaaacacaaacactaaaattctcaagaaaattctcaaaacagattcagggagaatgggagggtagtggtggaggggacggggggaaataattcataaaagaaaaatacagacaaaaacaataaccactctggccctgactgctccctacccctgttcctagcctcccgctcacgataacccaggcttacaaattaagagttcaagttaccagcctggaaatgctagacatttgccagcaacgacatcccagctaagtctgcaagggatctcttcctgtacccactgcacctgttatcctagttaatcctcagctccatgaaagtaaaggactcccatttcaatgtcacaaatggggaaacggaggcccagagaagcccatcgaaatccaggagggtcccagcccagggctctacttgggagaagctggggcccaagcgatgagactccccctgccccatcctcccgcccaggcctcaccttgtgcctgcatgcgggtccggaccagggccagcgggtaactggctatctggccgcaggtgctggatatggtaccgcaggccaggagcacgaggatgcctgggtctgccgagtcgtggctgtactgctgaagccaccagttcttcagagtctggagtggagaagggagtagggagggttggggtgggtgaccctaggaccctggcttcaaaggcctgctggccggttctgtatcccatgacaggtgctactagctgagcacttggtacctcctaggggccgggccagccctttccctgcgtcccctcacccagtcctcatctggaccctctctggtaggtggaataagggtcccctgtactgactatgccctaatctctggaacctctgcatatgttacccaagatgacacaaaggactttgcagatgggattcagttaaggatcttgagatgagattattttggattatctgagtggcccaatgccatcacaagggtccttctttttttaaaaattattattattattattttgagatgaagtcttgctctgttgcccaggctggagtgcagtggtgtgatcttggctcactgcaatctccacctccctggttcaagcgattctcttgcctcagcctcccgggtagctgggaatacaggtgcgtgccaccacacctggctaattttttgtatttttagtagagacagggtttcaccgtgctggccaggatggtctcaatctcctgaccttgtgatccgcctgcctcagcctctcaaagtgctgggattacaggaatgagccacagtacctggcctaattatttttctttttacagagatggagtgtca[132 bp omitted]gagtttcgttctcgttgcccaggcaggagtgcaatggtgcaatctcggctgactgcaacctccgcctcctggcttcaagcgattctcctgcctcagcctcgaagtagctaggattacaagcgtgtgccatcacgcccagctaatttttgtattattagtagagatggggtttcaccatgttggccagagtggtctcaaactcctgacttcaggtgatccacctgcctcggtctcccaaagtgctgggattacaagcatgagtcaccatgcccggcacaagggcccttctaagagttagaaaagtaggtgtaaagacagaagcagaagcgagagagagattggaagatgctatgctactggctttgaagatggaagaagggaccacaagccaaggagtgcaggcggcctctagaagctttttcaaggcaacgaaacagatttcctcctggagcatccagaaggaacgcagccctgccaacatctcgattttataaagcccagtaagaaccccattttggatttctgacctccagaactgtaaggatatacattcgtgttgttctaagacactaagtttataacttgtttgcttgcaagaaggg[138 bp omitted]aagactctgtctctacaaaaacaaacaaacacacaaacaaacaaacaaacaaaaaaaaactggatgtgatggtgcatgcctgtggtcccagctactcaagaggctgaagtgggaggattgcttgaacccaggaattcaaggctgtagtgagccgtgatgcactccagcctgggcgacaagagtgagactcagtatcaaaaagaaaaaaggtcgggcctggcgtcctcacactggtaatcccagtgctttgggaggctgagatgggtggatcacttgaggtcaggagttcgagaccagcctggccaatatggcgaaactccatctctactaaaaataccaaaattagccggtgtggtggcaggcacctgtaatcccagctactcaggaagctgaggcaggagaatcgcctgaaccggggaggcggaggttgcagcgaggcaagatcacaccactgcactccagcctgggcaataagagcaagactgtctcaaaaacaaacaaatgaacaaaaaaacactctccaacgacactgcctgtggtagatgctgtgagtacaccaccttcatcccttcccactccaattcagacctgctgacttcttactgccaacatttacccaaagactttgcttgtggactttctctgaacgcaggccagccggctctgaccacttaggaatgggcagaaagccctgggaaattagcatctccagatgcaaccttcaaaagactgacctggtggatcaataccccagctccctcatctctctggtgcagcatgtcttatgctgcctcccacagatctctagagggctggaactccatttgctaggaatagtaacttgcttgataacatactgttacgggttgaatcatgtccctcctttgggggggaacatgttgatgtcctaacccccagtatcttagaaggtgacattctttggaaatagggtctttgcagatctaattagttaagatgagtagggtaacagggtagacccttagtccagtatgactggtgtccgtagaggagaaagacagagacacacacggagaaagacagccaggtgacagcggaggcagagatttgagtgaatgtatctacaagccaaagaatgtccagggttgctgggaacaagcagaaactgaaagaaggaaggaaggaaggattctcccctaacaagtttgagagggagtatggctctgctgacaccttgattttgcacttctggcctctggaactgtgagacaataactttctgttgttttaagccaaccagtttgtgatactttgttacagcagtcctaggaaactaacatactcatactgtgtgcattgactccctgtctcattacctccccaataaatcacttgtcctcacgtcccagtttcagggtctgttttggaaggatctcaaactaagaccaaaactattattattattattgagacagggtctcgctctcacacccaggctggagtgcagtggtgaaatctcggctcactgcaacctccgcctcctgggctcaggtgatcctccctacttcaacctctggagtagccaggattacagctgtgcaccaccacacccggctaattatctttatttttattttattattattttttgagacacagtctcaccctgtcgcctgggttggagtgcaatggcaccatctcggctcactgcaaccccacctcccaggttcaagtgattctcctgcatcagcctcctgtgtagctgggattacaggcttatgccaccgggattacaggcatgtgccaccaggcttggctaattttttgctttttttttgagacggagtctcgttctgtcgcccaggctggagtgcagcggcacaatctcagctcactgcaacctccacctcccgggttcaagaaattctcctgtcttagcctcccaggtagctgggattgcaggcacacacaatcacacccggctgatttttgtatttttagtaaagacagggtttaaccatgttggccaggctggtctccaactcctgacctcaagtgatctgcctgcctctccctcccaaagtgctgggattacaggagtgagccaccatgcccggccctattatctctattttatagaaaagaaactgaggctcgggaagttacttgcccaaagctacaaaataaaggtgagaaccaacattcacagctgtatgtgaatctagaactgtgcacctgaagactttagggtggctaatcccttctgaagccttctgccaaggtgactgtaagaacaagaccttctttgctttgcggctgggagaggcttataggtttcatttcctatgccaattctaatccaccagaaattgctgcctgaaactggaattgtgttgagcaggactcagtgctgtgatggattagtaatgcctagcccaggcacagactgggtaaaataggcaagtacttaacattattgcctttgaaattttagaagccttcttttgggtctagaacagcacttgccaaatagatgtttaatgggttattattaagatcaatctgttgaaaagaagttctaaagacggccgggtgtggtggctcatgcctgtaatcccagcatttttttttttttttgagatgaaatctcgctctctcacccagggtggagggcagtggcgcgatcttggctcacagcaaactccgcctcctgggttcaagcgattctcctgtctcagcctcccgagtagctgggattacaggtgcccaccaccacgcccagctattttttgtatttttagtagaaatggggtttcaccatgttggccaggatggtcttgatctcttgatcttgtgatccacccccctcagcctcccaaagtgctgggattacaggtgtgagccactgcacctggcaattccagcattttgggaggccgag[132 bp omitted]gaggcaggagaattgcttgaatctgggaggcagaggttggagtgagctgagatcacaccactgcactccagcctgggtgacagagtgagactctgtctcaaaaaaaaagaaaaaaaaaagttctaaagactagattaatgtggccagcactgggttaaaaacaaaaaaagttaaatcactttactgagagacttctcggagcctttaagggacaaacacagattttgaaactccaaggtttctaaaacctcttagacttttaaagtccctttttgggtaaagaatgcattaaataataagactgtgtcttctttctgtctttctttctttctttttttttttttttgagacaggatcttgctctgttgctgaagctggagtgcattggcatgatcacagctcactgaaacctctgcgtactgggctcaagcaattctcccatctcagcctcctgagtagctggcactacaggtgtgcaccaccacacctggctattttttttttttttgagacagagtcttgctctgtcacccaggctggagtgcagtggcacgatctcagctcactgcaagctccgcttcccaggttcatgccattctcctgcctcagcctcccaagcagctgggattacaggtgcccgccaccatgcctggctaattttttgtatttttagta[264 bp omitted]ttttttttttttttttgagatggagtttcactctgtcacctgtgcagtgcaagaactcggctcactgcaacccccatgccccgccctgggttcaagcgattctcctacctcagactcctgagtagctgggattataggtgcccaccaccacgctcggctaatttttgtatttttagcagagctggggtttcaccatgttggccaggctggtcttgaactcctgacctcaggtgatccaccggcctcggcttcccaacgtgctgggattataggtgtgagccaccgtgaccggcctctactcatacctcttaatggcttcctattttacttagaagaccctgtaccctgccctgatcagtcccccccagacacctaagacttccactcctccaaaaggccgtatttgttcctgcttccagacctgggtactagatttgtgcatgctcccttgtgataatacgcccaacccatggcttcaatgtcaccttcttggaggcgttcctcaacccccctcccgcccactgttactgaagatgacaaatcctgtcttgtgatcttctgagagcttttctaggagctgaaactatcttatttgctggttgattgcctgccttgtttatgggaatgggcattccaggatggcagggaccatgctggtctcattcaacaccacaactgccacaatccgcacagtgtctagcacagagtagatggtcagtaaatagtcactaagcgaatgagtgaacaacaaaatggaggaacaaatgaatgagtgagcaacggtcttgtctcatttggttgtctacatgccaggtgctggggagggcaggtaaagatggcaggaacagagcctattagatcagaatcagctacataatttgcaggatccagtgcacaatgtaaaagggtgggggtcccttgttcaaaaattattggccaggtgtggtggctcacacctgtcatcctagcactttgggaggctgaggtggggggatcccctaaggtcaggagtttgagaccagcctgggcaacatggtgaaaccctgtctactaaacatacaaaaattagccaggcgtggtggcaggcacctgtaatctcagctactcgggaggctgaggcaggagaattccttgaacctgggaggtggaggctgcagtgggccgagatcgcgccactgcattccagcctgggcgacagagtgagactctgtctcgggaaaaaaaaaaaaaaattaagaatttcaggcctggcatggtagttcacacctgtaatccagcactttgggaggccaaggcgggtggatcacttaaggtcaggagtttgagaccagcctggccaacatggtgaaaccctgtctctactaaaaatataaaaattagccgggcatggtgatgcatgcctgtaatcccagctactcgggagactgaggcaggagaattgcttgaacccaggagatgtaggttgcagtgagccgagatcgcgccattgcactccagcctgggcgacaagagcgagactccgtctcaaaaaaataaataaataaataaaaataatttcgagacagcagtagcagagcgttacaccaagcacagggcccttccgagcatggggctctctgcgacttcacaggtcacatgcccatgaagcaggccctgtcttgcatacaaagattttggggggaacgcttggggacatccaggaccatgctaattgggggagacctggtgatcccactagaaggtaaaagcaacagatgaggtccctggaagagaaacagccaagaactgtctgcacctgcctgtgttgataaaggtctcaagatgctggtgattaggtgtggttcttatggtaacagcagatgctcaaatgggcaggccctgaagatgacattggcttagagaccgtggctgggtctgatacttgcttcggggaagttgggtgtctttgagactcatctttgcctgccttttttttttttttttttgagaaggagtctcgctctgttgcccaggctgcagtgcagtagctctgtcaccaggctggagtgcagtagcgggatgttggctcactgcaacctccgcctcccaggctcaagcaattctcatgcctcggccttttggagtagctggtattacaagcacacatcaccatgcctggctaatttttgtaatctttgcctgatcttatgtttgtcagctagagtggtccctgactttcaggtgaccccggaaggctgagctgctaatcaaaagtaagtggagaagtgggagagtccaatacctggaagggttccccaggattcccagggccaaggtgctcctcacctcataactgcctttctctaactatagcaggtcaactgagccagccccaggggaaggggaaggggtgtcctgtgggtaaatcccagaggggagcagggaaagaggaacgcgctgcccacagacctcgtagacggccaggtcgatgcccgcataggggatgatgcccagcacgttggggaggtagccgcggtagaaggcacggggcccctccctctccaggatacgcctggcgcagtccagcagccccttatactggcccgtccggcgcaaggtcagccgcgtcttcagcacctggggagaacctggttatccctggaaaagctgtcccaccaaatcgctacatccaggaatgaagacacctagaaatagctactcctgaaaacagatgccctgagaacaaccgaattttaaaaaccacctactctagaatcttctgctatccccaaatccctatacctagaaatagttacacctaccaaagtgcacacatgtggcaccaccagtaactgtctcctgatatctttcttttattttttggtcatttctgtagagatggggactcgctactttgcccgtgctggtctcgaactcctgggctcaagtgatcctcccctctccatctcccaaaggactggggttacaggcatgagccatcatgcccagacctccagtatcttgttcccttctgctttcatatcagaaactgtaactttcagcaagcacacagccactagaaagaaaaatgacatttcccagatgccctgggtatgtggctatgtcactatgtcctagccaaagaaatagaaggaagagaaagaggtacacataaggttcagaaagcatccttagaggtggggaggtgtttccttttttattgcttcttccttcttggctggagtgtggaatgtgatgaacggagcacaagcagccacattggtccatgaggttgtgtaacaacaagatagacagaaagaacctgcatcgctaacactctgaagctaccatcccagcctgaaatgctcatctgtagactttgttgatgtgattgaagtttttttttttttttttttgagctggagtcttgctcagttgcccagactgagtgcagtgacatgatcttggctcactgcaaccaccgcctcccaggttcaagccattctcctgcctcagcttcctaagtgtctgggattacaggtgcccaccaccatccccagctaatttttgtatttttagtagagacggtatttc[134 bp omitted]atccaaacaatacacttcataacctgaaacctgaaataatttatctgaaaacatgtagctagcacagtctatccttagaagaggcatattcataaacagttggtgacacctagacacgacgtccctgggaacgtgcaccctatccttagaagatgcatatttataaacagctggctcctatgactaccatccaaacaaggataaccgacactaccttccccagaaattatatctcagttgtaatacccagacaggctacacatgaaattgcattactctgatgagctatactccaaatcagagagggacaaaggtaaaatcccaatggatattgtgaaatgcagagtgagatgggtacagcaggccccccaccctgccatggggcctccgctggggtccctccttctcacctccatagggtaaatgatggtttgggctgtggcaccagccagggagccagccacgaagcgctcctgcacatgcagtgtctcctgctgccccaggatggccctcttgatctgaggcggggagacacagggatgggtaggaccatgggggttgaaccttccttgcactccactgttctcctggcttccaaagaactggcttgctgcaggcattcatgcagaggagcagatgcctgatcctggggacctgtgttcaccacccacccccaagccaatcccgtaaatctttatgtacagcccagtcttccctatggcaagcacattcctccctgtacctgccctcacctgttcataggccatgaacttgatagctgactcgggggcaatcttgagtacattaataccattgccgcgccacagggagcggatgcctccctcaaggaccatgcttcgaagccccccaaggatgttcagccggttggtctttgaggcatggacctgaatggggagacaacagcttggaggtcccctcccaggtgtcaggcctgggggagggggcaggtctctccagagcccctcacctgcatgaagaccttgaggcggtccagaggggccgtgcctgtccgtgacacggcacctgccactgcgccggccaccagctgtttccaccacatgcccgtcagcttctcttgctttgagaactcgtccggcactgtcaggcactcgccaatgtccaggacctaaagatacaggtgttgggggtgtcatgccatggtggggacagggagatgtgactcagtcctaaataggggagtctcctctatgaatcctaggataccctagagtctgccaatgactcttgcttggagaccccagaagagtcctgttgggtcctaccaggtgtcaccaaagcatctaacctagcagcctccttagaagatcccaatatcctactaaatcccaccaaaggatctgccaaatcccactaaaggatcctattcaagtatctgccacataaagatccctccaggctagatgtgatgcctcacatctgtagtcccagcactttgggaggcccaagtgggagaatcccttggggccaggagttcaagaccagcctgggcaacatagcaagatcccctctctacaaaaattggccgggcatgtgcctgtagtcccagctactcaggaggccaagatgggaggattgcttgagcccaggagtttgaggctacattgagctatgatcacaccactgcatttcagcctgggaaacagagtaagaccttgtctgtaacagcaaaaaaagatccctcagggcaaatgagattctactgaaggatcccactcaagggttttccatataatgattccaaaagatcccttcagggccatacaagatcttaccaggcacctcccctataaagaccccagcagatccttctcagggacccacgaaatctcacagggatctcctccacatggagtccccgtgcaggaatcatttccagtctagaatttctaaccaaggtccccatgaatcgtctggggtgggagtctctggatctccaaagaggttctcaccagatcccacagacggatccccctccagatgccatcagatcctaccagacacattgctcatagacatttcacccaggaactagggatctagagcaaacccccactaccctctctagtggctcccattggatcctctgaagaccgtgttttttttttttttttttttttttttttgagacggagtgtggctctgtcacccaggctagagtgcagtggcacgatctcggctcactgcaagctcccgcctcctgggttcacgccattctcctgccttagccttcctagtagctgggactacaggtgcctgccactacacctggctcatttttttaatatttttgtagagacggggtttcaccatgttagccaggatggtcgcgatcgcctgacctcgtgatccgcccacttcggcctcccaaagtgctgggattttaggtgtgagccactgcgcctggccaagaccgtggtttttgaacgattctgttcagccgtagaatcttttatccaggcagagaacccagcagaagagagctgtgtgggtggaaggtgggaggccttgtaccccatctggtgagctctttcttccctgtacccgcaacccccacacgctgtccccagaggccccgatgtaagtctcaagggctgcgcttcaatcagacagcagagatgtcccaaatgggacccttgaaccctaagtggaggaagagaggaacagaccctcatccgtcagctgctgccagtgccttctccttctggaaagtcctggtccagcccatccaagccctggggagatcggagcaaggcccccctggggaagagggcacagccttcagctggggaaagccacccccacctcaccgtggaatgcttccagaaatacagcacgtcctccacattttccagcgaatgcaacaggaagtggtcgcgccattcttgccagtcaatggtcattgtgccgtctcggtccatgctggggggaagaaagggggtggaggaggacaggttcagtgcctgggggtgggctaggctggggtgaagttctgctaggttttgcagtttgggaggttcaagtcctcatatcaaccctattagagatgtagcaaatattaccatcattttcttttttctttttttttgagacggagtcttgctctgttgcccaggctagagagcaatggtgcgatctcagctcactgcaacctctgcctcctgggttcaagagattctcctgcctcagcctcccatgtagctgggactacaggtgcacaccaccatgcccagcaaatttttgtatttttagtagagacagggtttcaccatattggccaggatggtctccatctcttgacctcgtgatccacctgcctcggccttccaaagtggcaggattgcaggcgtgagccaccatagccagctgtattaccctcattttgtagagggggaaacgggctaagagaggcaactggtcccagatctgtctggcttcaatttgaatttttctttctttttttttttttttttccagaaggagtctcactccgtcaccctggttagagtgtcctggcctgatcttggctcactgcaacctccacctcttgggtttaagggattcccgtgcctcagcctccccaagtagctggaattacaggcatgcaccaccacgcctggccaatgtttgtatttttagtagagatggggttttaccatgttggccaggctggtccccaactcctgacctcaggtgatccacctgcctcagcctcccaaagtgctggggttacagatgtgagccactgcgcctggccagatctgtctgacttcaaagccccaacctctcagctgtatcctccttgggactgggtctggagcccagaagacagagatggccaaggggtcactgtgtcctgagttactttggattccagacccccagcgactcacctgtgcaaaattttctcagcctgctccagcgagatggaaatgcccagagctcggaaactctgttggatctcagagacatcaatgtgacctggggagggggccggaggtggggaaggatgtgcgtgtgaggacacctggggaaccccaggaccaaggatcagaacagcttggaatggaggtggtctagcaagatcaggggctccagaaacctaggaggaggtttgcagtagggctgtggggggacccctgactcactggggtcagagaggtggaactgggaaatactgggggggcttctctgttctgtaaatgaatgaaggaatccaggggtaattgtaggggtctctatgccatgggggattgagaggcaatatccacaacccagatgctgctatgaggggatctctgtcccacaggggacccaggaacagcatagggtatctttgccccatagaaaaatctaagggtaattatcggggttctgccccagtagggaaaggaggtgggatgggctggctgggcctcgaaccacctagctagggggtgaggagtgctcctgaaatagcctatgagtcatcggggagaagcggccctccccctctcctcctagcgctgccagttctaaccccactgatgtctctagggcccccacagccctatcccttggggcctgcaggcaggtcgcccgaccttaccatcctggttccggtcaagactgtgaaacatgagcagcagacgctgttcccgctcctgcagatagcgggaaaattcctccaggtcgagcccgccatctgggtcagcatcaccctcagaggagataccctgacagagggaaaggggatagaggtggctccaggaacctgctcctgatctggaggggacgcatgtcaccttatgccttaggaacccagagcccccagcgccttgaggaaggggatagaagacgtcaccccacttctccctcagtcagctaacttctcagccagatccctacagccaccacaggtctgtgcggtgggtgtgagtggtctagttttcctggtgagcaaactgaggctctgcaaggtcaagtcaccagttcaaggtcacagaaccaggaaatggtaacctcagttctcatctgtaaagcctgtccttccagctgtctcttgtttttagtttttgttatttttttaggtatctcattcctgttgaacccagctgcctcttaaaaaaccctgtccacatgggggacccaggggttccctttggaggaagccctgggcgatgtggggcaggagagaaccaagcggagtggctgaggccttggtttttcccatttgggaagtgggaggttggactgctctcagggttgctgtggttctcttagagcgatctggggctacaggtgtgggaaggacctgcaaagtggaggtgggggcagcgggaggaaagtcttgttataggtgcattcccagctgcgggtgaccgcagacaggattgggtccctggctggggcagcccgggacagtgagccaggcccgtgaacggcccatgaaagggcaggccagggaatgtaaacacagggatcggggcagctgcaggccagggcagtaggtgcccagaggatggagggtgtgtctcctggaggtgagagcagggcacgtcatgggctgtgcagtctggaggagggtgtgtcccgggcagtgggcaggaaagcgcccccatctcttcccaggcagacgccccctgccccgcagcagggggatcgggtgttggccgcggaactgcaggcttggggcctcggcgtccctgtcttgagcgatcccgttaggccaaacacgagtgggtagggggaacgagacagagacacaggttctggagtccagccacaggtagtccctggtggctccggccgcccagttcaggggcttgggtaaccgggagcgggcggggccgggaggggaggaggtccctgggggtgggggtacctgttgggcgccggggtctgggttgcccccgcccagcctggccagcccctggcgcaactcgtgcacgtccacgcggccatccttgttactgtccagctcctcgaacaggcgaccccagcgctgccgccgctccgcgtcgcccgggctcccccgcatggcgcccgcccgggggggaggggaggcccggcagcggcggcctcagtgggggcttcgcggctccccctccccccccgggaccccgcagggtcagctcccgcggccgccggctccgcagcctccgcgcagtccgctcggctctggcacttgcgggaggtggtgacggctagccgtcgccgcccgcgccagaacttgcgtctcctcccccgacctgcattggggggaggggaccgagggcggagctgggggcgtggggagggaatgtctgggatggtctggtattgcacagccgaggaacaccagagttccttctgggaagacgggctagggagctcagtggtctcaggtctggtttcagagttccgcctctgcgtgcctcagtttaccctttccccctttgcccaagggggcaaggtagagcgctgtcggggattgggtttcataatccccttccacttgacctccccgccacacccactaatcttcaggaactcaagttctcgcttttcccagacgcacgcaagaaccgtgcaccatctcgctcgctctctgcccgcccgcgccttacaccttccccgctcggccgcagaaacagaagatccaggagcgatgctctcccactgtcccttcttcccgcccgcgcgcttcctttctcggttcccactctgactgggaaacagaaaatcaacgcgcggcgcggctgcaaagtcggtttcctattggtcagcgcctcctgggctgagcccgcccgccccgcctcttctcccacctaggcggggcctccccgcagacccccgactgcctccagcccgcagtcccaccgcctgccaggagatcttaaaggggccgcggccgcaatcagacgctgagcggcgtggggagggggtggctcagtgacccgggcgcggggttgaggatcccagtggtcgagcgctggaggcagggccccagcctgtcgcactcgctgcacctgcggaatgtccctactgctagtttcgggcgcagtttctcgatccaccattagggggaagggagcccagaccacttgacagcgaatactcgataacaaatctcactttgattcagtgctttgcacatgccagggcttttactcacctctcgagtcgtctttgccaaaaccctataaggtaggtggtactggcgttcgcactttgcagataaggaagcggaggttaagtcattctccccagtcctgatgaccactaaggggcaaaacagggtttaaagagatctgggatccttaaccatcactctataccctagaaagaattaattatcttttttttttttttttttttgaaacggagtttcgctgttgttgctcaggctggagtgcaatggcgcgatctcggctcactgcaacctccgcctcccggattcaaacgattcttttgcctcagcctcccgagtagctgggattacaggcgcccgccaccaaacccagctaatttttgtatttttagtggagacggggtttcaccatgttggccaggctggtctcgaactcctgacctcgtgatccgcccgcctcagcctcccaaagtgctgggattataggcgtgagccatcgcacgcagcagtgagttttttttttttttttttttttttttttttttttttttttttttttttgagatggagtttcgctcttattgcccaggctggagtgcaatggcacgatctcagctcaccacaacctccgcctcccgggttcaagcaatgctcccgcctc[211 bp omitted]acggggggggggggtttcacctg[132 bp omitted]aagggtcctcaggagggggtcttgttattatcatcatcctttatccaaagatacagcattggccggtctcggtggcttaggcctctaattctagcaatttgagaggccgagatgggaggatcgcttggggtcaggagtttgagaccggcctgggcaatatagcaagacacccaactctacaaataataataataattattattattttttttaaaaaggaaagaaaacaaagatacagtcgtgagggcatatttagttcacgcccagcctctgcctagacaggtgtgctggaacaggtgtgccccagacaaatgagtctcttctaagaggctccccagcagaggttttcatttacagttgttccttgcaggtgccatacagcatggagtgatacagaggtttttttccatgtaagtgcccctaaataggtgttttctcacagatacattcttgacaggtgggcctcagtgtatgtgagcccctgccctgatggttttacccacagatgtgtgtcaatgtgagtgtgccccgtgcagatgttccaagttcttcccctcacttgagctcaattccatacaggtgttcctcctacaaggtgctttctcttacctcacaggtatgtttctgagcaggtttccctccacccatgaatgcattctacagtctcccgccccgtaggtgtgtttcagttaagtatacacccatctgggtatgtttccatacaaccgagtcccatacaggtttacgtaaatgcaggtgtgtctcatacaggtatttacaagacactgacacccaggaattcccccaatgcaagtgccgtacatttcataggtgagccatgcagatatgttcctaaaacaggtctattccacatcagagtgccttagttagctgtttgtgatgataatgcaggcgtgttctatagagatactgtccaccctggtggtatgtatccatttggttatatttcttttctttttttgacagtcttgctctgtcacccaggctagagtgcagtggcgtgatctcggctcactgcaacctccgcctccagggttcaagcgattctcctgcctcagcctcccaagtagctaggattacaggcgcccaccactacgctagctaatttttgattattttttagtagagacggggatttcaccatcttggctaggctggtctcgaactcgtgacctcgtgatccacctgcctcggcctcccaaagtgctaggattacaggcgtgggccaccatgcccagccttggctatatttcgtatagctgtgattcaatgcagatttttttttttttttatgagatggagtttcactcttgtcacccagggtggagtgcaatggtgcaatctcggctcactgcaatctctgtctcctgagttcaagcaattctcctgcctcagcgccccccgagtagctgagattacaggcacctgccaccacacccggctaatttttgtatttttagtagagacaaggtttcaccatgttgggcaggctggtctggtttcgaactcctgacgtcaggtgatcctcctgcctaggcctcccaaagtactgggattacaggcgtgagccgccgcacccggccatctgttttctgtatgttcttatatgtgaacacctgtgcagttgtcttctgtacaggtttggttccacacaggtgtttaccatacagctgtttttttgtttttaaaatttttttagagacagggtctcactttgtcacccaggctggagtacagtggtacaatcatagctcactcactgttacctccactcctgggcccaatcgatcctcccacctcagcctcccaagtagctggggctacaggtgcgtgccatcacatctggctaattttcttattttttgtaaatatggggcctccgtctgtgggccaggctgatctcgaactcctggcctcaagtgattctcttacttcggcctttcaaagcgctgggattacaggatcacgccaccgcccccggcttattttcttctttttatttatttgtttatttatttatttattttttgtagagaatgaggcctcgctgtgttgcccaggctggtctcggactcctggcctcaagcaatcctcttgcctcggcctctcaaagtgttgggattacaggcgtgagccattgcgcctgggcaggtattttttctcattaagcgctccccatccaagtctgccctaggcaggagtgcctagtgcacgggtacatacataccccgtgcgtctccacacctgtgcgctcccacagatatgctcgcaatgcaggtgtaaggtccccctcacacctgcgcgcttccgcggtctccctccccgcatccccattaagggactggggtcccgttacaggtgcgcccacagcgcggccccgcccccttcttgactccgccctctcagcgaggctcaggtgcacaagccggaagtgcgctctcccaggtgagtgactaaactttccgggtcacgtgacagggcggagccggtggggtcggacccacagaacgaccgacggaccgagggttcgagggagggacacggaccaggaacctgagctaggtcaaagacgcccgggccaggtaggaaggcaggacgcaccgctaggcctgccccctcgcccgtccaccctgcccgtcccgtcccgtcccgtcccgtccccttcctttccccagcccaggaacgcgctcctgggagttaatctttaatcgctgacctctggcggctggggcggggcgggactcatgggtgccctggcgccagttgtctctcctgtgggcctgcgccggggtccccaccccgatcccaacgcctgggcctctccttctcctgtccccaggtgccccgtcgcaggtgcccctggccggagatgcggtaggaggggcgagcgcgagaagccccttcctcggcgctgccaacccgccacccagcccatggcgaaccccgggctggggctgcttctggcgctgggcctgccgttcctgctggcccgctggggccgagcctgggggcaaagtaggtaccagctgagagcgctgggggggaggggtctggattcctggatctctgctggggacgtggcttagaagcgctgggtatctggggcgcagagagggtcaagaattggggagcggggaagaaataccttggggaggggtctacagggttagggctcggggggattaagatttctagtttcttccttggacactgggagttggtctaggagacctgagttccccagcgaggtggaattgtgtgttggagtgggggctcctaagtaggacttggggggaggtaagggctgcgtacctgagtcttggtatagtgcaggtgtttttgggtgaactgggagctgggaggaggcctgccgagccgggtcgacctggttggctgaaggtgtagaccccagccattcagtcttagatttgttttgggagcctgtggggaggtgtgagtcagacactccagggaaaagctaggcccgcccagatccttaagggcccagggccgagaggtgagtaggggaggggtggacttctggacaccctactgggctctgcgggactgggtcgggggggtgtcctggggagcaaacacccaagggagaggtcttacctgcaagacacccaaccatctctgtgcgaatgaaaggcagagtttgaattgggacctgctagggggaggtgaaggggaatgcccaaagcaggtgcagatgggcggggatgggagagaaagatggagactgagttattctctgccttcaccctccacagtacagaccacttctgcaaatgagaatagcactgttttgccttcatccaccagctccagctccgatggcaacctggtgagttggaggtatatgtgggaagatggcagcaaggatgttatctaggggtcacacatatagcatgtagagaggactagacaccccctccccccagaggtggcaggtcagggtggctttggagagctctaagtaggagagacctgaagtcttagaccaagaagactaggacaccctggagggagtgggcaggaatactgtagctgtcagatgtgtgggctcaggaattccatatgcctctcaggtgggtgggggagcaaggagctcagacttggtagatgtgatgaaagcaggagtcccggccgggcgcggtggctcacgcctgtaatcctaacaccttgggaggccgaggcaggaaaatcatgaggtcaggagtttgaaaccagcacggccaacatggtgaaaccctgtctctactaaaaatacaaaaaattagccaggcggggtggcacacacctgtaatcccagctacttgggaggctgaggcagggggaattgcttgagcccagaaggcggaggttgcagtgagccgagattgtgacactgcactccagcctgggcaacagagcaagactcggtctcaaaaaaaaaagccggagtcccagacatggcaggtgcttgcgaggggtgtcccggacatggcaggtggtggggagccttcgcaccccagacaaggtaggtagggatccaggaagccccactgtggggatcagatcaccaaaagtggcagatgtgtgtatgtgtgtgtgtgtgttgtggggtagggggtgatgagggggatgccattcaggtggaggtggacaggctacccaggctcaggtgattcacacctgtcccctctctgcagcgtccagaagccatcactgctatcatcgtggtcttctccctcttggctgccttgctcctggctgtggggctggcactgttggtgcggaagcttcgggagaagcggcagacggagggcacctaccggcccagtagcgaggagcaggtgggtgcccgcgtgccaccgacccccaacctcaagttgccgccggaagagcggctcatctgaacgctggggcctgctgcagccaccaacactgcccaggactgcgggttgctggcttgtacaccgcagctgccaccgagacaccagcctctgatggctcaggaggacttgtggggagaggctgggggcacccatgtggtgggctctgtgcagcatgttgcctctgcttggctgtgcctgcagctcagggtgctggggctcgggacccacccccctgcttgcggaaccaacttttctctgtgtgtccagcaggccccacaaccccctctcctttctttcagttctcccatgcagccgaggcccgggcccctcaggactccaaggagacggtgcagggctgcctgcccatctaggtcccctctcctgcatctgtctcccttcattgctgtgtgaccttggggaaaggcagtgccctctctgggcagtcagatccacccagtgcttaatagcagggaagaaggtacttcaaagactctgcccctgaggtcaagagaggatggggctattcacttttatatatttatataaaattagtagtgagatgtaacaaaagctttattggtgtgtttgagctggtgggtgcattagctgagatggaagtgacaaatgccgagaggaattgtaaggttgccaggattctagaagaccaggaggcttcctggaattccctgctaggagccagttagagaggctgcccttggagggacagaggtgggtgggatggatttccgagcagagtgagggcaccagagaaattcaccaggaaaaaaaccagcttttttgggctcttgtggctttattgagggactggggtctctcttggacccctgattcttaaccctcaaagcacttcttaagatcagcgactctgggccggctgctgggctgggacttttgacagttgctggtgggtgtagcaggggaattcagggctcctggttcctcccgtggctggaggtgagcgcgctctgccagcagggctttgggaggccgggctctggggtcctccagagaactggggtctgaggaaggatcaaggggctgggacgtccaggctatatcaaagttgggctttgtgggggccagaatttgggggctttctggagggctgggctcagtgggtgcagtggagagccagggagtggggttttcctgggctgtagaatcttcagctgccttgtgggaaggggtgagatgaagaattaggggctctgtgagaggagagggtttggggtccccccagatgcttgggtctgcagaagctgttgaggactgggatggagacgtgacttcttggtcggactctgagggtatcagctgggacctggagtcctttgaagagctggtggcatccaaagacgaggcattttgcagggatggcagggaaaggggctggggctccggctctggtagtttcttatcgtctggttgccatcttggtatgttgggctaggtgagatggatagggaagttgtggcttttagatggcagaggggctggcaagttggatggaccattaggggaagacttggggtagggttgggggagtgggcgaggctctcaccaggctgaagcagctgtccaggtctcctctgtgacagcagtctaaactctggctcggtctcaggctgcctgcgctcttggctcccatgctaagactgtccagaatctcgctcaacaaatccagttcttctccagaccccaagaagctgctgtccagagcttcttctgcccacgggcacccctcatcctcagggctcagtgggggtgtcctgggtgaggatgggcagcctcagatatttgcccaagacccccagccctggtcaggctgctctggagtttgggaaccctcctccccatcagtcctggcctcccactttcaacactgctgttccctttttgccttaccccgcccctgggggctcggaagttccctcttccagctggcgtctcctgctggggcgaaggggccggttctgcaaagggtgggggcgataggacctcaggagactgcagaatcggggggctgaggcttgctggagaagggtgagtgtgaagtgggtgccacatatttggggagttgaagaaggaggtgagatgtctggatggggactgggatgggtagaggattcagtgataattccaggtgtgtgcatggggggaggggcgctctcacctttccaaagtgctgagtgattgggaggcgttgctgcaggcggtctgagcggctggggagggctggggccctcagagagccccccctctgcaggacagagtccccatcctaggaagagaagagtgaactgggaacctctgccacagagtctccccaccaccccctaccattggtctttagttagtctttttttttttttgtttgaaatgaagcttcactcatgttgcccaggctggagtgcagtggtgccatctcggctcactgcaacctctgactcccaggttcaagcgattctcatgcctcagcttcccaagtagctgggattacaggcgtgcgccaccatacccagctaattctgtatttttagtagagatggggtttcaccatgttggtcgggctggtctagaactcctgacctcaagtgatccaccctcctcggcctcccaaagtgctggggttacaggcgtgagccaccgtgcccagccacagtcttcttttttttgagacagggtctctctgtcacccaggctggtgtacagtggcgctatctcagcttactgcaacctccgccttctagactcaagcaatccatattcagataatttttaactatttttttgtagagacaaggcccc[132 bp omitted]tctgcacccccttcaagccactcttggcctataaaggagtggacagagaattacccaagggtggtgggatcctgggcatttgagagctcagccttctgtcccctaagatagcttttttttttgccatctgcatgtctcaaatacgttcaccaccccccatacaccacctaagaagtcaatgcaaactttcacccctttgactaatataaaatgagtattcctggaggcagtcatccccaaagaaaatggggagtggcaaagcaacagggcaaggtgttcctgtttcaaagcggtgaagaacaaaatcgcacggacaattttgagctgcaaaaattggccccaggaaacttctgagcttgggagataaaaggcagaacctggaattgtagcatccaaggacaaaaagaatgtttgccagcaaatcttggctgtcaattttaaaggggccgtgggcggggcggaggggggcgggtaggattccaacaaaaaatgagtataataaataaaaaataaaagggggaagagttgttaatggtttaactgctggttcagttctgattaaatcatttgtgtttaaagtgtctgccagggtcaaaatactccatccttgggaggtcaaagtgtcctctgtcccctccccctcgtcaccccagcaagagtggcctgtccagctcagcctcaccgagcggtacatgttcttgacggctggttgggtcttggccttgactgagtgcaggagggcgccaccacctttctgcgggagagaagataccaagggggagaggctagggccagatcccacctccccatcccaggttgtgtgatgccaatcaagcccctttccctctctgagtctccattttttcacctctataaatgaacatgatcgtagtcatgaccctacctggtgacttgcggagttaaattaatccaatgagacacacttaagtgttttgtttttgtttttgttttttttgagatggagtctcaaagaacagtttttttttgttttttttttttttttgctgagatgcagtcttgctctgttacccaggctggaatgtagtggtgccatctcggctcactgcaacctccacctccctggttcaagcgattctcctgcctcagcttcccgagtagctgggactacaggcgcctgccaccacacccggctaatttttgtatttttagtagagagagagtttcaccatgttggccaggatggtctcgatctcctgaccttgtgatccgcccgcctcagcctcaaactcctgacctcaggcaattcgcctgcctcagcctcccaaagtgctgggattacaggcatgagccaccgtgcccaggcaacaaagtggtttttgagacagggtcttgctctgtcacccaggctggagtgcagtggcatgatctcggctcactacaacctccacctcctggggctcaagccatccttccaccttagcctcccgagtagctgggactacagctacacctagcgaattttttttttttcagtagagatggggtttcgtcacgttgccctaaccggtctcaaacttctggtcgcagcaatccttctatctccacctcctaatgtgttgggattacaggcctaagccaacgcccacggcctattgttctggtggtcttacctttagattgtcggcccagagctgataggatcgaagggcccctggggtaaggagagagtgtggtggtcaccgaaggctggctgaggctgggggtgctggtggcgggtagtgggggacccaggggctggactcagggctcacctgaggaggccccgcagccagtgatctcctgctcgaattgatctgagaagccctcccccttgttgagcttctccagccgggcttcgatgaactggggtgggggacagtaaatcagaaacagcaggagacacatctgaatgccagcacttcgaagcctgcctgctgtcaagatgtagaagccatctctggcctccaacctgcccacccccaagcacctgggaaactggagcccactttattttttatttttattttttgagatggagttgctctggcacccaggctggagtgcagtggcgtgatctcggctcgctgcaacctccgcttcccgggtttaagtgattctcctgcctcagcctcccaagtagctgggattacaggcatgcaccaccatgcccagctaacttttatattgtttgtagagacagggtttccccatgttggccaggctggtttcgaactcctgacctcaggtgatccgtctgccttgggctcccaaaatgctgggattacaggcgtaagccactgtccccggcccggagcccactttagaaaccagagatcctaccttctcctccctccccgagtcaggacctgtccccagggaccaagccctgcccctttcagggacccagaaattgatttctgccccctctagaactacccacccgctctcattgaatcaagagtaggtggaccccatctttagggatcttgtggtccaagctaccttctcccaggggcctagaagtccagccctatgtgccaccccgcccccccacccatatccctaggactcaggaaatcctgggatttcacagtcaggacccatcccctctggagtccagcttggaccgccaccccagtcccagaaagacacctgcttagggacctgcgaatttggtcccaccctgatttccctcagggacctaggagtaggtcttgtcccccaggaacccaggagttgggggctcccatgtttttgttttgttttgttttgtttgagacggagtctcgctctattatccaggctggagtgcagtggtgtgatctcagctcactgcaacgtctgcctcccgggttcaaacgattctcctgcctcagcctcctgagtagctgggattataggcgcacgccaccacgcccagctaattttcgtatttttagtagagatggggtt[133 bp omitted]tcagtccttccccacttgggaaccctggagtaggggatcctgctggactgtctccagctataccctcagggacccaggagtctgccctcaaccctgccagttcagacaagccctcggggactcagcagtccacctccagtcccagctggaccctcagggctctggcatacctgtttgaacagctgcaggtgcacagcccgccggtggaaggcctgcagaggtgccccaggcttctgggccaagaagacttcctcactgaaggtcactggctggccctggaagaagcgttggagttctgagctccctggggtgctcctggccctccctcattctactatatatttatgtagcaaacattgattaggcacttgctgtgtgtctgatcctgtgtggggcctcatggatggcagggaggacttaagctgttttttgtttgtttgtttgttttgttttttgagacggagtctcgctctgtcgccaggctggaatgcagtggcgtgatctcagctcactgcaacctctgcctccagggttcaagcgattctcctgcctcagcctcttgagtagctgggactacaggcacgtgccaccatgtccagctaatttttgtatttttagtagagactgggttt[131 bp omitted]tttttttgagtcagggtctcactctgtcacccgtgctggagtgcagtggtgtgatcttggttcactgcaacctctgcctcctgagctcaagcgatcctcccacctcagcctctcaagtagctgggaccacaggtgcacgccactgcgcccagctaatttttgtagtttttgtagagacagggtctcactgtgtttcccaggctggtccaaactcctgggctcaagcaatccacacaccttggcctctcaaaagtgtgagtcaccgacccggctgatttaagcatttatctcgagtaaggtggaagcccgggaggggtgtgggcgggggggtggggggagggaaatgatctgactcgggtgttcacaggtgacctctggccactgcagggaggacagactctgggagataaagcagagggctgcttgcaggaggccgggcgcggtggatcacacctgtaatttcagcactctgggaagaggagatggatggatcacctgaggtctggagtttgagaccagcctggctaacatggtgaaaccccatctgtactaaaaatacaaaaaattagccattgtggtggtgcatgcctgtaatcccagctattcaggaggctgaggcaggagaattgcttgaacccaggaggtggaggttgcagtgagccgagattgtgccactgcactccagcctgggcaagagagcaagactctgtctcaagagaaaaaaaaaaaaaaaagaagaagaagaagactgcttgcgggggagtcccagtttttgggagagatcagtgcattaattttaggcaaacaatgagagggtccaggccagggtggagacagaggaagtgggtggtctgtgtgcagattcaggatgcagagatgacaaaaacgtcagatgctcaagtgatactagaaccccccaatgattttacagattggttgtgaaaaacaggggagggggcttcagagatcaaggccccggcttcaacattcacccactgtgggacttctccaaagccttggtttcctcatatggaaaatgggactatcacagtatccatctcaaaatgttatgagcattaaatgagataatagcagtggtaggagctagcatttattgagtgcttgctgtatgtcaggtacgattcaaagtgctgggaaaatgctgattcactgattctaatatccttttgggtggcactattggggtcccattttacagaggggcaaacagaggcacaaagtaagcactccattaatgctacctatcattattattttttaattaaaaaaatatatagagacggtggccgggcatggtggctcacacttgtaatcccagaactttaggagcctgatgcgggcagatcacctgaggtcaggagttcgagaccagcctggccaacatggagaaaccccgtttttactaaaactacaaaaattagctgggcatggtggtgcgcacctgcagtcccagctacttgggagtctgaggcaggagaatcgcttgaacccgggaggcactccagcctggggaacagagtgaaactctgtctcaaaaacaaacaaacaaacaaacaaacaaacaacaacaacaacaaacgggaggggtctcactgtgttgcccaggctggtcttgaacttctgggctcaagcaattctcccatctcggcatcccaaagtgttgggattacaggcgtgagccactgcgtccggccatctactgtacctatcgttacattgcgattcattcaggaacccacgagacctctcccgcagcgtccccgctgctcaccgggctgcagacgagtgcgtcgcggtaccccccgaagagcagggcctgggctttgaggaagagacgggacaccccttccccgggggccagggcgaccttcctgagccggagcctcagcagggacacctgaagcacaagggagtggccctgagtgggcaggtgtgggcccctcgcctcccggggcaggaaggtgggaggggcgacactgaccacgtctggaggcagcgcctgcacgtcgttaaaggtcgtctccaaggtattggcgtccacgttcagcaccacgacgtcctccagggctttttctcgtactctctgcggaaaagcggggtcggccgctcagagcccgggagtccttggcagaggagggcatctggggatgtagaggaagggggaaccctcacgtccccgtcgtctgggtagatccacgctcacctcggcgagactggcgtgcactccaatgaggtagggcatgggcgcgctgcggaccgaggggacggggtcatgcaggcaccgcccccagggcctgcccacaggccctgcccctcccagctgccctcgctcaccagcagtagtccagcaggtgtgggggcagcgtggggatcagcacgtgctcccagcgcatggggtacaggagcgcgcaggacgcgtggacgcacgaggtcagctggggagcgatggcggggcgtggagtcagggcctggaccctctagcgcgaggtctcttccagctgcatttcccacgtccccagtctcctgttccccctccccatccactgctggataatgagtgacaactcgaacccctttagaaatcatgtggagaccaggaatttggccacttacagtgctttaagcgggtgaagccaggactcataccgtcctgatccctctctgtaaggggcgcagttaataggcaacacccctgagtcttccccatgcaggtagagcaaggactgagcctccactgactccaccccgaaagaggtggagctatgacgtagaccgcccttgtcccgcccctaggggtggatccaagacgtaaccccacccaaagaggtggagccggaaggcaatcatttggccccgcccctaggggtggagccagtctccacgtctgcctttgaccctgggtttcagggtccctgggagtatgggtctctagttttttgcgccccttgttatctgagtccctgtgttcctaggtccctgggtattcgggtccctgggtcctcagatctctgagtccctgagtccctgggtccctgggtccctggattcccacgtgtataagtccctagttctcagtgtccctgagggtccggaggggtggagccagacgtgttgcggcccatagtgggtggagcctgagcacagtactcccaaaaaggaggagctgcagcgcagccccctcccacgagggcggggccagagttcaactctccaagaccttcgaaggggcggggccaggacttcgccctcgggtctcgcgcagtagggttagagccaggaatcagcccccttgtcccgccccccggggcggagccaggccctgctcccaccccggcccggcggaccccgcctcacggtgctgagtttgctggcggtgagcaggactcttctctcggccaggagcgccgcgaacagccccacgatgttctcgtcagtcacggccaccaccagctccgttaggttcctctgaggatcagagagtcgctctgggcgtggacgggcccctggatcttgcatccccggtccgggtttcgggacctgttctcacccccagagacccctccccactcacgttctcagggatggatggcaggcggccggagtccggggccacgaagcaggaaagctggtgggggtattggcagggggatcaatcagtcaggaggctggcctcacctggacccccgaccttccagggtccccgagccccgctcaccggcttgctattcccccgggtagggggggggataccctgcccgctggagaccgtcactccgctgccctggggaagaggcacgactctgtggtcatgatggctgggacgcagccttcccatccacctaaggtccagcgcccagggaatgggagctactcaccagctcaagccccactgaggcctggggcccagacagggactgctgaaacagattttgaagaagttcctctgcctcggtgacctgggtgggacgtggaggggcgggggtggctgagccagatgtggggattggggattccgagggctatgactaaggttgagtggtctgggaggagccaagggctcaggtcagtcctgggagtttttttttttctttctttaaaagaaattaataataataataataataataatagagacaaagtctccctatgttgcccaggctggtcttgaactcctgggctcaagggatcctgctgcttcggcctcccaaagggctacaattacaggcgtgagccaccgcgcccggctttttaaattttttaatttaaatttttccttgtaggccgggcgcggtggctcgcgcctgtaatcccaaccctttgggaggctgaggcatgcggatcacctgaggccaggagtccgtgtccagcctggccaacatagtgaaaacacgtctctgttaaaagtacaaaaaaaaaaaaaaaaattagccgggctggtgggccgcgcctatagtcccagctacttgggagactgaggcggaagaatcgcctgaacccggaatgcggaggttgcagtgaggcggaatcgcaccaccgcactccagcctgggcgacagaggaagactccatctaaaagaaattttttttcttgagacagggtcttgctctgtcccccaggctggagtgcagtgctgcgatcatagctcactatagcttcgaactcctgggctcagttgatcctcccaccttgctctcctgagtagctgggaccacaggtgtgcaccaccacgcctggctaattttttatttttattttttgagacggagtttcgctcctgttgcccaagctggagtgcaatggcgcgatctcggctcactgccacttccgcctcccgggttcaagcgattctcctgccgcagcctctgagcagctgggattacaggcgtgtgccacgacggccggctaattttttttttttttttttgtatttttagtagagacggggcttcaccatgt[135 bp omitted]tgttgcccagctggtctcgaactccagggctcaagggatcctcccacctcggcctcccaaaatgcagggactacaggtgtgacacagtgtgccctgccaagcctgggagatctgagagggaggggttgggaggttgaggggggtgggggctgggactcccacaggagtgagagaggggctggtctcacttggtcctgggctaggaggtctcccactgtgttcaatagcttgtaaaacacctcgaaccaaggcaggtggctgtggagagaggagacaggttccacgaagtgtccctaggcctcggcctttcccatccccccctccaacccccatatcccgcacctgaggatgcagagacagctctgggtacccgcccgcaggcggcagaaaccaaatctgcggttgccggcaaggtctgtgagggcgaaggtgaaatgctgcacggcggggctggggggctccctggagtgggaagggctgttagagagacctggacatcccagctgtctgaggatgtccccgctccccaacaaagctcctaggaccctgagtgtatgggtctctagttgtcaggatccctgaatgtctggatccctgggtctcagaatccctgggtccctgaatctctgggtccctggatctctgggtccctgagtccctgggtccctggatctctgggtttctggatctctgggtccttgaatccctaagtccctgggttcctcagtccctgagtccctgagtccctgagtccctggtccctgagtttctgagtctctgggttccgaagtccctgaatccttgtgtccctgagtccttgagtctctgagtccctgggtccctgggtccctgggttcctgagtccctagatctctgggtccctgagtgtctgagtccctggatgctaatgtatataggtccctagttctcagggcccctgagtgtctgagtctctgagtctcagggtcctcgagtgtatgggtttccagatgtctgagtctctaggtgttgagtccttggggcccctgagagatctgagtccctgagtccttggatctccccgcccttccgtacctttccacatcaaaagggaagcagaatttaggcaccatctgcatagcttcctggaggtgaagaaaagcgcagactgcttggccactgaggtcgggcaccacctccctgggctccaggtccaagaaaccaagtcccctccccctgggagactggccctcgccctgggggagcaaggagccagcctgaatacctggtccctgaagtctggagggaactgccgcaggatggggggatctgtagaagagagcacgcctctaagttcagcgacccaggcccaccctcccctcccactccctcactcccaggctcccaactcaccctcctgcagggaggcagggcaggccgcttcgaagaaccaatcaaacacagcaggggagccccctctgtgggatgcagaaggggtccagagacttgcttctatgcatgtgtggttgtgtctgccactttgcacacaagtgtggttgtgtgtgcatgtgccacaaggtgcgtcggcatgtgcatgactctgggggtttgtggctgtgagtgtgtggttgtgtgaggctgtgtgtgcagcagtgttaattgaacacacaagtacaggatggagtgagaaagtgtgactgtgtgtgtgtggctgtgtatgattgtgtgtggctgagtgcatggcttttgtgagcaggcagtgtgtgtgtgatcctgtctgctgtctgcctgaaaagatgagactgtctcctatatctgtggcatgagactgcacagatatgaaggacagcccgtgcagtcccaagctaagtgaattacatctctctctctctatatatatatccatctatctgtctgtctgtctgtctctgtctatccatccatccatccatccacccacccacccacctatccatccacccacccacctatctatctatctatctatctatctatctatctatctatctatctatctatctatttttttgagatggagttttgctttgtcacccaggctggagtacagtggcacgatcttggctcactgcaacctccaccccacaggttcaagcgattctcctgcctcagcctccctgtagctgggattacaggtgcccgccaccacgcccagctaattttcatatttttagtagagacagggtttcacatactggccaggctgttctcaaactcctgacctcaggtgatctgcccgcctcagcctcccaaattgctgggattacaggcttgagtcactgcatctagccatgccatctatattttcttgtatagatgtgagtgtgtgtgcccgagcaagtgaatgacatctatattttcctgtacagctgtgagtgtcactgggtaaccgcgtgggatccttgtgggctggctgtgtgtctctgtgtgtgagaccccatagaaccctcgtggctggtcccacatgtctcatcagagaaaggagggcaggatacctaggtacttactgtaagccctgcaatctctgctttcctcctctgcccccatatcaagcagaagaggcagccttgggctcaaggagagagacagggagatctagagggagatcagctgcacacacactgtcccgcccagttgcacacacagtccccaccatgggtaccccagcacttcaccctcacgccgacacaagtcacacacgatcacccactcataccaacacccagcctcccctctgccctgatcatccgccctgtggaccccctgaagccatcactcagacataccaaggacaaagctcagaggggtacatgcattcacagagctatagacataatcacaggagctggatagagagagagagagagagagagaggaggggaccgagagtggcctgtcccagagtgaaggtcatagcggaggcccatggagtatctgattccagccacctgccctggcaggtcactgcacctcccgggcctgctccagccccagctcccctctgccccggctcaggcctggcccgggaatcttgtaccagagaatgagggatggggtggctcttactcagctctggattccatggtccctgcagggccagcccagcggggccctctccccaggggtcctgggggcctgtgtatgctgggccccaagccggctcagcttcctgtgtggctgagagaggaagtttaacgggtgacgtccccggacagaggccctgcccccacccccgtgagaaacccaggcatcctgcctgctaattatgttggggatgggtgggcaataagtggtcagcctgggaaggcagacccccagctccgtccccgccaggctggactgtgtctggttccccccatcgtgcctgggccctcatctctccttccccgctccgcagcagccaagattcacagtctgtctattaatgaaatgcctccccgtctctttcccttggtccatttggcctggacggtcactggtggaccaccagagggagccacctgtaaagtggacggtgggggggccagggatggggacaaagagcacgaagtacaggcacagggacggacagacagacacagacacagacagttacacgctcaggaagtcatcagcacagacaaaccgagtgcagaagagccagagacgacagacatggagagatagggagtcctacagctggatcatagtcccaggccgggcacagtggctcacgcctataatcccagcactttgagaggccaaggtgggaggaccgcttgagcccaggagttcgagaccagcctgggaaacatggcgaaaccctgtgtctataaaagctacaaaaattatagctggcggtggtggcacgcacctatagtcccagcttacccaggaggctgagtcaggaggatcgcctgagcctggggagtttgaggccatagtgaaccaagattgcactactgtactccagcctgagcaacaaagtgagatcctgtctcaaaaaaaaaaaaaaacaacttagtcacagttacacacccattgtgcgcagaaagacaaggtaagcggatcacttgaggtcaggagtttgcaaccagcctggccaacatggtgaaaccctgtctctaattaaaaaaaaatacaggccaggtgcggtggctcacatctgtaatcccagcactttgggaggctgaggcaggtggatcacgaggtcaggagttcgagaccagcctggccaagatggtgaaacccagtctctactaaaaatacaaagattagccaggcacggtggtgggcatctgtaatcccagttactcaggaggctgaggcagaattatttgaacctgggaggcggagtttgcagtgagccgatatcgcgccgctgtactctagcctgggcgacagagcaggactctgtctcaaaaaatcaaaaacaaacaaacaaacaaaaaattagctgggcatggtggcatgtgcctgtaatcccagctgcttgggaggctgaagcaggagaatcacttgaatccgggaggcagaggttgcagtgagccgagatcgtgccactgcactccagcctgggtgaaagagtgagactccatctcaaaaacaaaaacaaaaacaaagcaaacaaacaaacaaacaaatgcagagacagacagagacacaataaacagttacacagagaccacagccattgatacaaacagaataacagagaaatagacccagatagatggaaacacagcacagacatagctcaagtaataaccagatatagttatagccaagacccggccacatgcagagagagacacagctggactcacatgacagccagatactcatgacagcccgacacactcaagccgtgctgcagactatgaaagacacaggggctggaggcagtggctcagtaatcccagcaccttgggaggctgaggtaggattgtttgaggccaggagttaaagatcagcctgagcaatataacaagaccccatctttacaaaaattaaaactttagccaggtgcagtagtcccagctattctgtaggctgaggcgggaggatcccttgagcccaggtggtgggggttgtagtgagctgtgatcgtgccattgcactccagcctgggcaacggtgtaagaccctatctccaaacaaacacaggaacaaacaaaaacaacaaaaaagacacaggcacacaggtggacagacgtagtcatgttgagacaggatatgtgaacatatctgcaggcacaaaaacagaacatgatatagtcagggtcacacctacacatgaaatcctgccaacagactca[131 bp omitted]agaaaccccgtctctactaaagatacaaaattagccgggtgtggtggtgacacatacttgtaatcctagctactcagggggctgaggcaggagaattgcttgaacatgggaggcggaggctgtggtgagccaagatcgtgccattgcactccagcctgggcatcaagagcaaaactccatcaaaaaaaaaaaaaagaagaagaagaagaagacacctcgtacccacagtcactggacacatacagagtcagaatcccgtcagccacatcctcacacagtctgatggacatgtgctattgtccgaatatgtgtccctccaaaattcgtatgttgaaacctaaagccccaaggcagtagtaagaggagccgagattgcgccattgcactccagcctgggcaacaagagtgaaactccgtctcaaaaaaaaaaaaaaaaaataggtgaggcctctgggaggtgatgaggtcaagaggtatccaccctcaacagtgggattaatgcctttataaaagaggcttgaggcccagtgcggtggctctggcagggtgcagtggttcacacctgtaatcctagcactctgggaggctgaggggggtggattgcttgaggcagaagtttgagaccagcctgggcagcatggtgaaaccccgtctctacaaaaaatacagaaattagctgggcatggtggtgtgcacctgtagtcccagctacttgggaggctgagtgggaggattgtttgaacccaggaggcagaggttgcagtgagtgaagattgcaccactgcactgcagcatgggcagcagagagagactctgtctcgggaaagtaaaaaataaaaaaataaaaataaataaataaataaataaaaagaggtttgagctaggtgtggtgatagcgcctgtagtcccggctacttgggaggctaaggcgggaggatcacttgagcccaggagttcaagcctacagtgaactttgattgcaccactgcattccagcgagtgacagagcaagactctatgttaaaaaaaaaaaaaattaaggctgctatgacaaaatatctgcaacctctgcctcccaggttcaagtgattctcctgactcagcttcccaagtagctgggactacagatctgtaccaccatgcgtggctatgtagctagctacttgggaggctgaggcaggagaatcgcttgaacctgggagttgtagtgagccaagatcgtgctattgtactccagcctgggtgataagagcgaaactccatccccctacccaaaaaaaaagagagatggggtcacactctgtcacccaggccgacgtgcagtggcgccatcatagctcactgtagccttgacctcctgggctcaagtgatcctcccacctcagccccctgagtagctgggactacagttgtgtgctactgtacacacaactgtttttttttttaaatttaatttaattttatttttgagacagggtctcactctgtcacccaggctggagtgcagtggcacgatcttcactcattgcaacctctgcctcctgggttcaagcgattctcctgcctcagcctcccaagtagctgggattataggcgtctgccaccgcacccagctaatttttgtatttttagtagaggtggggtttcaccatcttggccaagctggtcttggactcctgacctcgtgatccactgatccacccgcctcggcctccaaaagtactgggattacagccatgagccaccacgcccggccctttttttttttttttttttttttttgtgagacggagccttgctctgtcacccaggctggctggagtacagtggcgcaatcattgcaacctctgcctcctgggttcaagcaattctcctgcctcagcttcccgaatagctgggattacaggtgaccgccaccacgcccggctaatttttgtgtgtgtgttttagtagagatctggtttccccatgttggccaggctggtcttgaactcctgacctcaagtgatctgcccgccttggcctcccaaagtgctgggattacaggtatgagccaccgtgcctggtcagctcagctaattttaaaaaatatttttgtagagatggggtttcgctttattgcctggtctggtcttgaacttctggcctccagcaatccccaggcctcggtcttccaaagtgaatgggattacaagcacgagccacagtgcccagcctgtttttatttttattttatttatttatttattttttgagatgaagtctcactgtcgcccaggctggagtgcagtggcgtgatcttggctcactgcaagc[259 bp omitted]cctctctgtgtctcctaggctggagtgcagtggtaccattatagctcaatgccacctgtaactccttggctcaagtgatcctcccacctcagcctcttgagcaactagggttataggcacagccaccacacatcgttaatttttttgttgtttttgagacggagtttcactcttgttgcccaggctgagtgcaatggcacgatcttggctcactgcaacctccgcttcccaggttcaagcgattctcctgcctc[131 bp omitted]ctcagcctcctgaagtgctgggattacaggtgtgagccactgcgcctagcctttttatttttatttttaatttttttgagagacagggtctccatctgttgccctggctggagtgcagtggtgccatcatagctcactatagtctcgaactcctgggctcatgttatcctcccatcccagcctcccaaggagctaggactacagcaatgtgccaccacacccagctaacttattggaacaattttcatagagacagggtcttgctatgttgcctagggtggcctcaaactcctggcctcaagagatctttgtgcttcagcctcccaaagtcctgggattacaggtgtgagccacagtgcctggccgagccagtagcatttatcttcaaatctctctcacttgctgggactcctgcttttgtcctcacttcttctctgactctgatcctctgtctccctcttataaagatccttgtgattgtattggacccacccaaataatttgccataatcctgttatcttaaaatccttaactttgccaggcatggtggctgacgcctgtaatcccagcactttgggaggctgaagcctgaggatcgcctgaggccagaagttcaagaccagcctgggcaatatatcaagat[137 bp omitted]catggtgaaaccccatctctactaaaaatatggaaattagccacgtgtggtggcgcatgcctataatcccagctactcggaaggttgaggcaggagaatcgcttgaacctgggaggtggaggttgcagtgagctgagatcatgccatggcactccagcctgggcgacagagtcagactccacctcaaaaaaaaaaaaaattaaaaattagctgggtgtggtggtacacgcctgtagttccgaatcaggaggctgaggtgggaggattacttgagcccagaaggtcgaggctgcagtgaatcgtgatcacgccactgctctccaggcaatagagtgagactctgtctcaaaaacaaacacaaaaaaacctacacctggccggacgcggttgcttgctcttgtaatcccagcactttgggaggccgaggtgggtggattgcttgagctcagggatcctcccacctcagcctctgaccagcctgggtatcatggtgaaacgccatctctacagaaaagctagctggcatggtgacacatgcctgtagtcccagctacttgggaggctgaggtaggaggatcacttgagcccaggaagtcgaggctgcagtaagccatgattgtgccactgcgctccagcttgggtgacagaaggagactaaaaaaaatgttgaaccccccaaagcaactgcctcatcaaagtttggggaaatactttaaaaaaaagaaaaaaagaaagaaagaaacaaacaaaaccaggctgggtgtggtggctcacacctaatctcagcattttgggaggctaag[137 bp omitted]tgaggcaggagaatcatttgaacctgggaggtggagattgcagtgagccaagatcgcaccactgcactgcagcc[156 bp omitted]tactaaatatacaaaaaattagcctggcgtcatggcgggcgcctgtagtcccagctactcgggaggctgaggcaggagaatggcgtgaacccgggaggcggagcttgcagtgagtcgagattgcgccactgcactccagcctgggcaacagagcgagactgcatctcaaaaataaataaataaataaataattaataaactaaaaacaaaaaacaaaaaagcaaataaaaagtccgtacacttctgagtagttaagtgccttgtgcaaggaaggaggatgctgagtggggaacccaacccagatctatccattatgctgctacctaaatcctttgtattgctggtctaccacccagtgctgtgctgtgctgtgctgggcctgctgaagttgccgtgggctgatgtccacgctgcttccctcatgcctctccttactcctggctgcagggggacgtagcaagaagactgaggctccagcctgggtgcctggtgtctagcatagagtggtggacgttactgcttggctctccgcgtgtccccctctcacctacccttgcccctggctcgtcttcctaatgcagacgctgcaaaaaacccctccaacccctacatttcccagatgcctttgctgctccgtttctggatgcagaattggttctaccaatgagaaatgctcatgagagatttagaaagtggaagtgaggcagtgtgggcttgtgtgtatatcttgctgagaagcagggttgtggagctatacattttattttcatgaattcgtgttctttgttggacccatttccaggtcatagttctggtaactgcctctttgttctccacctttctccctatacaaaggagctgctccttggtgacccagctctgtggtgtcacgagggtcctacctattccggggctgctcaatctgtggtcttattcacacatctttagcatctcctgagaacttgttaaaaatgcagagtcttgagccccaccccggacctacttactgaatctgcaactgtgagggggtgagactgaagaaactgtgcgttagcaagttgttctgctgattcttttgcacggtaaaatttgagaagcctacacagcccactctctcagcgtcttccagtgattttgcaagcaccatcgattcttgtattaagttcctgtctgcttaatatacctagaatggtccccacacggaactctggctgcctgtgtcaggattctagggttcaactagcagggtttgaattccagctcactgtttagtagccatgtgaccatgggcaagtgactttgtgtggcaaattgtaatttattccttcattttttccttccttccttctttccttccttcctccctcttctctccctccctcccttccttacttccctccttcctgtcttcctgtcttcttgccttcttcttttcttccttccttccttctttccttccctcctttcttttctctctctctttcttttctttctttccttcttttttttgagacagagtctcactctgttgcccaggctgaagtgcaatggcacgatctcagctcacttcaacctctgcctcccaggttcaagtgattctcctgcctcagcctcctgagtagctgggattacagttgcgtgccaccatacccagctaattttttgtgcctttagtagagacggggtttcaccatgttggccaggctggtattgaactcctgacctcgtgatccacccgcctcagcctctcaaagtgctgggattacaggtgtgagccaccgtgcccagtacattcccctcccctccccttacttcccctcccctccccttccgttcccttccctttcttttctcccacagtgtctcactctgtcactcaggctgtcgtgcagtggtgcaattacagctcagctcactgcagccttgacctccttggcctgctgagtagctggggttacagttgtgcaccaccacagcgagttattattattattattattattatgtattttttgtagagacagggttttgccatgttgcccaagctggattcaaactcctggactcaagtaatctgcccgccttggcctcccaaaattttgggattacaggagtgagccaccgcacctggccaaaaatttgtaatttctaaagatggccatggctctattactcaccctacgtgctcttctagaatcttgccactctaccatcaagagctggagtgtgggttgggcatggtggaacatgcctgtaatcccagcattttgggaggccaaggcgggtggatcacctgaggccaggagtttgagaccagcctggtcaacatggtgaaaccccatctctactaaaaatacaaaaattagctgggtgtggtggtgggtgcctgtaatcccagctactcaggaggctgaggcaagataattgcttgagcccaggaggcggagattgcagtgaaccaagatcatgccattgtactccagcctgggcgacaagggtgaaactctaacaaaacaaaacaaaacaaaataaaagagctggaggatggaccaagtgtggtggctcatgcctgtaatcccagcactttgggaggctgaggcaggagactagcctgggtgacaaagtgagaccctatctctaatgtctactaacaatacaaaaaaattaaccagctgtggtggcatgtgcctgtagtcctagtgactctggaggctgaggtgggaggattgcttgagcccaggagtttgaggtttcaatgaaccatgatcacaccactgcactctaccctgggtgacagagtgagatcctgtctcaaaaagaaaagagctggagtctgtacttcatccccttgaatctgaacaaggcttagtgactgccttgttggtgagtcctgaataagtgacactgtatgacttctgaagttaggtcataaaaatgcaatccgtttttttttgcatttacttctgtcctgctctcttggggtgtttgctctgggggaacctggcagccatgttgtgaggaagcccaaggggactatggagagacactaaggtctttgttctccttactcctgctgagcccccagctgataattggcaccacctggccagtctgttgtgagccaccttggaagtagatccctctacctctggctaagatgctctggctgatgtcatagggagcctaaatgaactgcctcgccaatccttgctcagattacagatttgggagcaaaataaatacctgtttttgtcttaagccactaagttttgggggattgttacacagcaaaagctaactgataatgctcttctctctctaaaccttggcttggaaggggatagaagcttaggccttccagggttggtgtgaggcttgcatgaaatgaggcatgagtcatgcacacagaaaagtttcatgtgggtgagctgtgttgttactctggcaagattgccacttgggtgccagctcaggctgccatcttcctggcacccttccctagagattccccttcctgccttccatatttgcaaggtgctgcacagagaacagcagtacctctgccaccaagcacccactctgtgctcctgagatctcctcagatcctcacgaacaattctgaggtgggtgtgtcagagacgtgtgaaccagaacaactccatcttgaataggagctgggtaaaatgaggctgagacctgagacctactgggctgcattcccagatggttaaggcattctaactcacaggatgagatcggcataagatacaggtcataaagaccttgctgataaaataggttgcagtaggccgggtgcggtggctcatgcctataatcccggcactttgggaggccgaggcgggtggatcgcgaggtcaggagatcaagactatcctggctaacacggtgaaaccccgtctctactaaaaatagaaaaaattagctggatgtggtggtgggcgcctgtagtcttagctactcgggaggctgaggcaggagaatggcgtgaacccgggaggtggagcctgcagtgagccgagatcatgccactgcactccagcctgggcgacagagtgagactctgtctcaaaaacgacaacaacaacaaagcaaaacaaaacaaaacaaacaaacaaacaaacaaaaaacaggttgcagtaaggaagctggtcaaaacccaccaaaaccaagatgatgatgagtgacctctggttgtcctcactgctacactcccaccagcgccatgacagtttacagatgccacggcaatgtcaggaagtcaccctacatgttctaaaaaggggaggcatgaataatccaccccttgtctagcatatcatcaagaaaaaaccataaaaatgggcaaccagtggctctcatctgtggagtagccattctttgttttttttttttttttttttttttttgatacggagtctcgctctgtcacccaggctggagtgcagtggcgccatctcagctgactgcaacctctgcctcccaggttcaagtgattctcctgcctcagcctcccaagtagccggaactataggcgcctgccaccacgcccaggtaatttttgcatttttagtagagttggggtttcaccatgttggtcaggctggtctctcctggcctcaggtgatccacccacctcagactcccaaagtgttgggattacaggcatgagccactgcacctggctcctttatttatttatttaattattattattttttgagacggagtgtcactctgttgccaggctggtgtgcagtggcgttatcttggctcactgcaacctctgcctcccaggttcaagcgattctcctgcctcagcctccggagtacctgggactacaggcgcccaccaccacgccctgcgaatttttttatttttagtagagatgggatttcgccatgttgaccaggctggtctctcctggcctcaggtgatccacctgcctcagcctcccaatgttgggattacaggtgtgagccaccgtgccctacccctttactttcttaataaacgtgcttttactttatggacttgccctgaattctttcttgagatccaagaaccctctcttggggtctggattgggaccccattcctataacagttgtggggggatcctgggggaaaacatacgatcccattttacaggtgggaagaccgaggctgagagaaggcaaatggcttagtcaaaacctcagggttagtgggtggcctagcctggcccgtctgatccctccccagcacgccccccatccagagatgagatgtcatcggtaccctcctccatcctgtagagaaaagcccgcacttgctgtaagagaggaaagagggattcggcagaaacatccatgacaacaattaatttatttattgagggtgaggcagggaagcggggagggagggtaggggtgacctctcttcctcacaggcaccaggccttgtttctctcccagataagctaaggtcggcaggggctgaggggagtgaggcagggaggatgcatggggcctgtgggaatcagagagaagctggggtcagaggtaggagctgacgctgtggggggtggggggtgaaaggtgaggcaaggtcaaaggtgaactgcagctcggagggaggggtccaatataaaccaggacttgcaggtgtagaagtaaaatgggactcatagagggtgaaagagaagttggagtcagaggggattcagagatcaaagagaagttggggtcagaggtaggagctggggctcaggtggggggttaaaggtgaggcaaggtcagcggtgaagtgcagctcagagggaggggtcaaacataaaccagaacttataggtctagaggtaaaatgggattcatggggggcagaggtcaaaggtgaagcagaagtcaggggtgaaggaaggtctgcaaagttaaaggtgcggtttccagagtcagaaggggtgaagcggggctcctcctgggaatgtcaaggttggaagagctcaagggggttaaagataaattagggctcaaaggggagccagggtcggagatgaagtagccagaggtaaagcgagctccaaaggtattgttagggtcagcggggagtcagccttggagggaaagcggggctctagggttcagagatggggggcctagcggatcaaaggtcagaagcctcgaggggacaggtgggaagcgatgggagcagcctaggccacctcctcctccgcctcctcctcgaactcgccctcctcggccgtggcgtcctggtactgctggtactcagataccaggtcattcatgttgctctcggcctcggtgaactccatctcgtccatgccctcgcccgtgtaccagtgcaagaaggccttgcgccggaacatggccgtgaactgctcggagatgcgcttgaacagctcctggatggccgtgctgttgccgatgaaggtcgcggccatcttcaggccgcggggcgggatgtcgcacacggccgtcttcacgttgttggggatccactccacgaagtagctgctgttcttgctctgcacgctcagcatctgctcgtccacctccttcatggacatgcggccccggaacacggcggccacggtcaggtagcggccgtggcgcgggtcgcacgccgccatcatgttcttggcatcgaacatctgctgggtgagctcgggcaccgtcagggcccggtactgctggctgccccggctggtcaggggtgcgaagccgggcatgaagaagtgcaggcgaggaaagggaaccatgttgacggccagcttgcgcaggtcggcgttcagctggcccgggaagcgcaggcaggtggtgaccccgctcatggtggccgacaccaggtggttgaggtccccgtaggtgggggtggtcagcttgagggtgcggaaacagatgtcgtagagtgcctcgttgtcgatgcagtaggtctcatccgtattctccaccagctggtgcacagacagcgtggcgttgtagggctccaccaccgtgtctgacactttgggcgagggcaccacgctgaaggtgttcatgatgcggtctgggaactcctcgcggatcttactgatgagcagcgtgcccattccggaccccgtgccaccccccagcgagtgggtcagctggaagccctgaaggcagtcgcagctctcggcctccttccggactacgtccaggacagcgtccaccagctctgcgccctccgtgtagtgcccctttgcccagttgttgccggctccggattggcctagagagggaaggggaggggacacacatgcagttatggggagccccaacccttgactctgtctctccaccacctggagggcctctagtagttgaat[174 bp omitted]tggtggcgggcgcctgtagtcctagctactcgggaggctgaggcaggagaatggcgtgaacccaggaggcggaacttgcagtgagccgacattgtgccactgcactgcagcctgggcaacagagcgagactccgtctcaaaataataataataataataataataaataataacaattatagccaggtgtgctggtgagcgatcgtagtccctggctactcgggaggctgaggcaagagaattgcttgaacctgggaggaggaggctgcaggtagccaagattgagccactgcattccagcctgggtgacggagtgagactccatctcaaaaacacacatacacacaaaacactcccccgccccctgcctaaaaaaaaaccaagactgggcacagtggctcatgcctgtaatcctaacactttgggaggcagaggtgggaggattgcttgagcccagcagttcaagactagcctgggcaacctagtgaggccatgtctctacaaaaaaaaaaaaaaaaaaaaaaaaaaaaaaatatatatatatatatatatatatatatatatatatatataaattagccagtcatggtggtggcacacctgtagtaccagttactaggggggctcaggtgggagattgcttgagcccaggagttggaggctgcagtgagctatgatcacaccattgcagcctgggagacagagcaagaccctgtctctaaaacaaataaataataacaataaaaagattaatatttaacatcattattaataataatatcattttcaggcagggtcttggtatgttgcccaggctggagtacagaggtgcaatcatggctcactgcagccttgacttcccaggttcaagtgatcctcctgccccagccttttgagtagctgggactacaggcttatgctaccagatctggctaatttttgtatcttttttttgtagaggtggggtttcgacatgttgcccaggctgttcttgaactcctgagctggagcaatccacctgccatggcctcctaaagtgctgggattacaggcgtgagccaccatgcttggcctgtgttttcttgttaatcatgtttattgtctgcaagctcactgtggaatgcaagctcccggaggaaaagaatcagtattagaatattggccaggcgcagtggctcatgcctgtaatccagcacttagggaggccgaggcgggcagattgcgaggttaggagatcgagaccatcctggctaacacagtgaaaccctgtctctactgaaaatacaaaaaattagccgggcgaggtggcgggcgcctgtagtcccagctactcgggaggctgagcctgcagtgagccgagatcgtgccactgcactccagcctgggcgacagcaagactccgtctcaaaaaaaaaaaaaaaaaaaaagaagaatattggccaggcgtggtggctcacgcttgtaaacccagcactttgggaggccgaggcgggcggatagcgaggtcaggagatcaagactatcccggctaacacggtgaaaccccgtctctactaaaaatagaaaaaattagctggatgtggtggtgggtgcctgtagtctcagctactcgggaggc[136 bp omitted]gccggtattactgtgaacagctaacgttttctttcacccctcatctgtctccaccttagttcagctccagcatcaccctcctggataagttcaattccctctgtcctggtcccctggctcctacccttatcacccagtctgtcctctccacagtacccacgagaggacacctgagagcaagtaagtcaggtcccgtccctcctctgcctacagccctccatggctcccacctaccttggggtcaaagcccaaatcctccctgcaggccacaaggccctgccggacctgccccatcccctccctcactctgcttcagccgcagctgttactccagctttccaggtgtggtcctgccctggggcctttgcactagtggcttggctgcttagaatgctttccccccaggtattcacctgactttttcctcacttccttcaggtctcagctcaatgccacatcctcagagaagccacctctggtcaccccctccctcctcctcccgagcctggtggtttagactgcagattctcgggactgacaagacaaactgtgtgaccttggacaagtgacttcccctttctgatctgttggaagatttcaaaacataatgatgcagttttgtggccgtggcccatcataggtccttgggaaatggctgggtgaaatcaagatgaaatgagattggccaaatggtgtgagtgatttcaggaggaccagagggcttacagttgggccaagagattctatggcctctgggtggccagggggtgggaggagcattaaaagtgtgggctcagaccaggcgcggttgctcatgcctgtaatcccagcactttgggaagcagaggcaggcagatcacctgagaggtcaggaataggagaccagcctggccaacatggcgaaaccccgtcactattaaaaatacaaaaaattagctaggtgtggtgatgcatgcctgtagtcccagctactcgtgaggcaggagaatcgcttgaatctgggaggtggaggttgcgtcactgcactccagcctgggcaacggagactccgtctcaaaaaaaaaaaaaagcgtggacctagtagtcagaccctctcctctggctcctgacagccccagtggcttgcagtgtgactttctgcaagtgacctaacgtctctgtgcctctgttttctcacctgtaaaatggaagtaagaggcgagttgcggaaaagattcagagaggcaggacaggtcctgcatttagcacgtcttacatgctgggagtattggaggcgggtggagccagggtggggacatgcagccagctggagccaggaaagctttcccggaaggattgtcccagggtgtggacaccccactatcttcacatatgctgttgcctccgtcttaaacatctttcctcccttccatgccctttggccagtccaaatcctactcacattctagactgcagatagtaatgaaaacaacgacaaatgcttatttacctctttctctgtgtcaggcattgttctaaactctacacatattcatgactttaagcttcacaatttttttttttttttggagacgaagtttcactcttgttgcccacgctggggtgcagtgtcatgatcttggctcaccacaacctctgccgttcaagcaattctcttgcctcagcctcccgagtagctgggattacaggcatgtgccaccatgcctggctaattttttatttttagtaga[143 bp omitted]aatccctgttttatttgatcttttttagagatggggtctcacaccatcgctcaggctggagtgcagtggcaccatcatagctcatggcagcctcaacctcccaggctcaagtgattctcctaccttagcctcacgagtagctgtgactacaggtgcacaccacctcactcagctaattaaaatttttttctttttgtagagacagggtctcaccatggtgcccaggctggtctcgaactcctgacctcaagctctcttcctgactcagcctcccaaagtcctgggtttataggcatgaaccaccatgcccagtgaaatccctgttttaaagacgaggaggccgggcaaggtggctcatgcttgtaatccagcactttgggagctgagttgggtggatcgtttgagtcccggagtttgagaccagcatgggcaacatagagagacccacctctctacaaagaaaactaaaaaattagctgggtgtggtggtgcatgcctgtaggtccagctacttgggagactgaggcaagaggatcacgtgtgcccagaggtggaggtgacagtgagccgtgatcatgccactgcactctagcctgggtgacagcaggacagacagaccctgtctgaaaaaaaaaaaaaaaagaggatttttgaggcccagaaaggctgaggagcccatcctaagttatccatctgaatcaacccctggcagagctttacttatttatctcctttgtggcctatcaccttctaccagaatgggagctgcactggggcagagagggagctccggctgtttgattcttacctggatctccagcttctagaacagggcctggtatgcagtgagtgctcactgtttgttgaatgcatgaagtggcagaattgggatgtgcacccaggcagtctggttccggttcagaccgttgaattaaaatgccacctcctccaggaagacttccctgaatccttctctgtatccgccctcctcagggctctcacagtggcctgagcatcccctcatcacagccctggatgcagggctggtgcctggtgccctgtccaccccatctctggtctgtgggccccggtggtggctgttgactctgtggtgttagcaggaataaggaggttttccagcctctggctccctgctgggggactcaccaaacacgaagttgtccggccgaaagatctgaccgaaggggccagaacggacagagtccatggtgccgggttccaggtccaccagcaccgctctggggacataatttcctcctgcagggaaacagatggagggcagttcgatgcgtgccaggaaccacaggcgcccggtagcatcctgttccctcccagctgccccttcccacctggaaggtgcctccttcgccctacctgtggcctcgttgtagtacacgttgatcctctccagttgcaggtcactgtccccatggtatgtgcctgtggggtcgatgccatgttcgtcactgataacctcccaaaactagagagagaggtggtcggaagagttgagagaggggaagccggtggccaagccgaggactgcccccagcccccaactagctccctagctgccacctctcccccagcaaggtgaacgggggacctagaggcatggtgtcggggcgaggatgaggcagcaagaaggagcggtgggggcggggtgcagccgagtcagcacccagcggggccggctggtgccagcgcacccaggctgcagcccgggggaggcaccggggctctttgtgcgtgaggaggggacagtggcccagctgtgggcccagctgtgacaggcggacagaaggctggctcccactctccgcagcctctttgttcccagtctggccctgccacccccaccccgcgacccttcccccaaggcccctggggcgcgctggcctcctggggacctcattcctttccaaagactcccaggttgcggggtgctccggggaccgaccccgcggtgctccccggggccgccactgcctccccgggccccgttccccgagcaccttggccccgatctggttgccgcactggccggcctgcaggtgcacgatctcccgcatggcggtggcgctgagggtggacgcggcggcggtggcacgagcgcggggagctgcggcggcggcgagggtggaagatgcggcggagacggcggagcacggtccctgcgcccccgggagccgctatatgagcgggcggggcacgcgtcacggccggtcaccctcccgctccgccccttggtcccgccccgggatgatggagggggctggggtggggggaggtggtgcagggacctccctccccagggggcctcccagagaagtccgggacgccacgtgctccgacccctgccttgggggtgaggccccttagggagccaccagtgcagtctcccccgtcccagcccccagccaggcttggccacccgcagaaattgggcggaggaagggaggggagcgcctggtaaacaggcatctgagaagtcctgcccctcccccttagcctccaccctcccgccccaggccttgcctcagtttctcggtccgcagccccccttctcattctatttagacctcattcgccagaatccttgcagtaaccgcgagccctcccagtgggctgggggctccggagcggcgatctggtttgcgggtggggggcggtaggttcctggagggcttgtcctgaagctgcatagtaaaaccacgattttcctcccatgattgggtgcagatgctggtgggctcccctggtacacctctactgggcattgagctcgtcccaggtggggtcacccccagcctggcctaaggaggagagtggaggagtaagacagctgggttcatattgggagggggacagtgagtccccagggctgcctcgctttcccaaaataacacccctcctctccagtattgtaatttatctttatctatatctatacccttttttttttttttttgagacagagtttcgctcttggcgcccaggctggagtgcaatggcccaatctcggctcactacaacctcagcctcccaggtccaagcgattctcctgcctcagcctcccgagtagctgggattacaggcatgtgccaccacgcccggctaatttttttgtatttttagtagagacaaagtttctccatg[135 bp omitted]ctcaggctgtagtgcagtggcatgctcatagctcactgcagcctcaatgtcctgggctcaagcaatcctctcacctcagcctcccaagtagctgggactgcaggtgcatgccatcacgcctggctaattttcaagattttttgtagagatggggtctcgctatgttgtccaggctgctctccaactcctgagctcaagagatcctcctgcctcagcctcccaaagtgctgggattccaggcatgagccactgcgcccagctcagtattataatttattacccaccatctcccttgcctctgcatttcctgtagcattaggtgtatgaccttgccctggtgctcctctctgtgtctgaatttcacatttgcaagttggggtggtgaggaaggcccaccctccagggtctgattatgcgatgacccagttaacaaggtggcgatagtctcccctcctgcagagtcaacaataaattgtatctttctcgagtctaagtattatcagaggctggactggacttcctgtgctgcccctcatgtgaaggtcaagcctcctggggctgcttccttggacagcctccagtcccgccctcccaggaagtctcctcctcgcctcccatccttgactttcccactcaaggactttggtgtattgctggtgggaggtggggtaagccatcttggccatgtggttgggacctcacatttgccatggccactaattttttttttttttttttttttttgacagagtcttgctctgtcacccaggctggagtgcagtggtgccatctcggctcactgcaacctctgcctcctgggttcaagccattctcctggctcagccgccccagtagctgagattacaggtacgtaccaccatgaccagctaatttttgtatttttagtagagacgggctttcaccatgttagccaggctggtctcgaactcctgacctcgtgacctgcccaccttggcctcccaaagtgctgggattacaggcgcgagccaccgcgcccagcaaattctttttttttaatttcttgccctgtcatccaggctggggtgcagtggcatggccatggctcactgcagcctcgaactcctgggctcaagtgattctcccacctcagcctcccgagtagctgggactacaggcatgcaccaatatgcctgggtaatttttgtatttttttgtggagatgggggtcttgctatgttgcccaggctggtctccaacgcctgagctcaagcaatcctcccacctcagcctcccaaagtgctgggtttacacatgtgagccatcgtgccctgcccaatgaccactaaatttgaccagtggctctcaacagcgtgtgtgtgagagtgtgtgtgtgtgtgtgtgtgtgtgtgtgtgtgtgtcgggggggcgggggagcggtgatattgccttcccagggaacacttggcaatatctgaagacatttttggttgtcgtacccagatgggggcggggatgtgtgtgtgagactatgtgtgcactactggcatctagtgggtggaggccagagatgctgctgaaagcccttcagtgcacaggacggccccaccccagagaatgatgcaggcccaatgtcaacagggttgaggctgagaaatcctgtgttaattattttgggaaaaaatttgtgttagccccttcgctcacactagatgccagaataaattccagaggggctagaccttatatgggtttggtggggcgatcccttagcttctgtgacttatatactctctctccctcaactcagttagtatgtgtgtatgtatgtttttatctttttagcaagctatttttttttttgagatggagtttcgctcttcttgcccaggctggagtgcagtggtgcaatctctgctcatctcaacctccgcctcttgggttcaagcgattctcctgcctcggcctcccgagtagctgggattacaggcatgcactgccacgcccggctaattttgtatttttagtagagacagggtttctccatgttggtcaggctggtcttgaactcccgacctcaggtgattcccctcaccttggcctcccaaagtgctgagattacaggcgtgagccactgcacccggccgccatttttttttttttttttgagacagtttcaccctgttgcacaggctggagtacagtggtgtgatcatatctcactgcagccttgacctcccaggctctggtgatcctcccacgtcagcctcctgagtagctgggactacaggtgggcaccaccaggcctggctaatttttgcattttttgtagagacagggtctcgctatgttgcccaggctggtctcaaactcctgggctcaagtggtcctccttcctgtcaggcctctgagcccaagctaagccattgtaacccctatgacctgctcgtatacatccagatggcctgaagcaactgaagatccacaaaaaaagtgaaaatagccttaactgatgacattccaccattgtgatttgttgcggccccaccctaactgatcaatgtactttgtaatctcccccacccttaagaaggttctttgtaattctccccactctcaagaatgtactttgtgagatccacccctgcccccaacacattgctcctaactccaccgcctctcccaaaacctataagaaccaatgataatcccaccaccctttgctgactcctttttcccactcagcccgcctgcacccaggtgaaataaacagccttgttgctcacacaaagcctgtttggtggcctcttcacacggacacgtgagacactgccttggccttccaaggtgctgggattataggtgtgagccactgcgcctggccagcaaatgattttttatttactcgcatagtatagctccaataggaaagtaatttggcttagcactctttacagctccagcacaatcttgaaggcatcc[187 bp omitted]gggtgtggtggtgggcgcctgtagtcccagctactcaggaggctgagg[131 bp omitted]tccccacctatacttcttttttttttggagacggagttttgctcttgtcgtccaggctggagtgcagtggcacgatctcaactcactgcaacctctaactccggggttcaagtgattctcctgcctcagcctcctgagtagctgagattacaggtgtgcaccaccaccctcagcaaatttttgtattattggtagggacagggtttcaccatgttggccaggctgatcgcaagctcctgacctcaggtgatccactcgcctcggcctcccaaagtgttgggattacaggcgtgagccaccacgcctggcccctatgcttcttttttcttttttatttttttgagacggagtttcgctcttgttgcccaggctggagtgtaatggtgcgatctccggctcaccgcaacctctgcctcccaggttcaagggattctcttgcctcagcctcctgagtagctgggattacaggcatgtgccaacacacctggctaattttgtatttttagtagagacggggtttctccatgttggtcagggtggtctcgaactcccaacctcaggtgatccactagcctcagcctcccagagtgctgggatttcaggcgtgagccaccgcacccggccgcggcccctgtgcttcttatcttgctcacgaatatctgaaagtttgaagattcttccagctttaaaagcagttatgtgggctgggcgtggtggctcatgcctgtaatcccagcactttgggaggttgaggcaggtagatcactgaagaccaggtgtttaaggctgccctggccaacatggcgaaacccctgtctttactaaaaatacaaaaagtagctgggcatgatggtgcgcacacttgcagtcccagctactcaggaggctgaggcatgagaatcacttgaacccagaaggcagaggttacagtgagctgagattgtaccactgcactccagcctgggtgacagagagaccctctctccaaaaagaaaaaaaaaaattgatctctctttctgaggtccataaaaccaggaaaaggcctgcctccttgttggtgtgatctgcctgtcatctggggctggggcaacgtttccaccctctctgtgagcctcgagaaattgttgacatacaccccagctcctcatcctccccgaggggacagagagggcccactctgcctattattaataataatagtgctgtgtagaccagatctatggccagatcttgttttcaagtgcttgctgtgtcagcttgtgtgtgtgtgtgtgtgtatatatatgtgtgtgtgtatatatatatgtgtgtatatatatatgtgtgtgtatatatatataattatttttttaggtggagtctcactctgtctcccaggctgcagtgcagtggccctatctcagcttattgcaacctccaccttggcctcccagtgctgggattacaggcatgagccactgcacctggccttgtttatattttacttatttatttactttttgagacagagtctcactgtgtcacccaggctggagtgcagtggcctgatctcggctcatcacaacctccacctcccgggttcaagtggttctcctgcctcagcctcctgagtagctggaactacaggcgcccaccaccacgcccggctaatttttgtattcttagtagagatggggcttcgccatgttggccaggctggtctgccaatgtgctgggattacaagcgtgagccatggcacctggccagcttgtttatatttttagctgatgaaaccacaacctaggaggtagttgctgttctatgcctattctacagatgagaaaatggaggcctaaggaagttgagtatctcacctgactgtcccatactgttgaggctgggaatagagtcaaaagagccccgcattccaggtccaaagaccctgctctttatcgctacaggatgttggagttactttgttatttgactttttttgttttgttttttgttttgaggcagagtcttgctctgtcacccaggctggagtgcagtggcatgatcttggctcactacaacctctgcctctgggttcaagtgattctcctgcctcagcctcctgagtacctgggattacagatgcacactaccacacccggctcatttttgtacttttagtagagacggggtttcaccatgttggccatcacaccaggctagtctcaaactcctcacctcaggtgatctgcccaccttggcctcccaaattactgggattacagacgtgagccaccatgcccatccagttatttgatcttaaaaaaaaaaaagaggcggggtacagtggctcatgcctgtaatccaagcacttcgggaggccaaggtacgtggattgcttgagcccaggagtttgagaccagcctgcccaacatggtgaaaccccgtctgtactgaaaatacaagaattagccgggcatgatggcaggtgcctgtaatcctagctactagggaggctgaggcaggagaattgctttaacccgtgaggcggaggttgcagtgagctgagattgcgccactgcactccagtctgggtgtcagagcgagactctgtgtcaaaagaaaaaaaaaacaaaaaaacccaaaaggctggcaatccagtgagttgtctttcaggaggaaaatgttgctggtgttgaggcagccgtgtgactgtcacgtgctccgtggcctgggcctctccgtgtcatgtgtctgcccaccacggtgcccggtgttcccggctggctctgatgtgtgctgtcagcttccagcatcggaatgtatgctgtctttgtgtacttggcctgtgggtcactggcccttttcccaaggtccttgccaccccttctccccggcccctccttccacctccccacccagacggtagagtctgatttccttttcctctgccagggtggagcccagccctgggcattgacacagccagcatgggccctctccagctagaggcagcgggagacagagggttggaacggttactgttctgagacagggatgctgaatgagtcttaagagaagccctcccaactccagggacacacacaagctctgtggaagccgtgcctggcactgttgggaccaattatggggtggggggtgctggaaggggtggggagggggacaatggagcattctctggccttgctgggcctactgccaccagataccccatgcagtacatcccgaagaaggcatgttcagaatagaaggatttcctagtggctcacacgggtaatcactttaagaggccaagcagggaagatcgcttgaggccaggagttcaagaccagcctgggcaacaaagtgagactctgtccctaatttaaaataattaagtaaataaactagaaggatttcctgagccaggtgtgttggcttatgtctgtaatcccagcactttgggagactgaggcaggaggatcacttgaggccaggaattcaagaccagcctgggcaacaaagccagataccatctctattaaaacaaacaaacaaacaaacaacaacaacaaaaaaaaaaccataaaaaaatagggccaggtgccgtggctcacacctgtaatcccagcactttgggagggcgaagtgggcggatcacctgaggtcaggagttcgagaccagcttggccaacacagtgaaaccccgtctctactaaaaatgcaaaaaattagctgggcatggtggcaggcacctgtagtcccaggtacttgggaggctgaggcttgagaatcacttggacctgggcaggggaagttgtagtgagccaagattgcaccactgcactccagcttgggagacagagcaagactccatctcaaaagaaaaagaaaaagaaaagaaataataatagaaggatttcctgggagatggggagggaggagtgttgacatcagctagggctggggctggaatggggaggggacactttctgaactcctcttccctacccaccccattgcctagcagtgaggacctcgtctgggcacccggtgcaggtgtagctggtgtgcagttgctctcacagtttaaggaggccggatgtggcaggcacatggtcagaaagtggggctgcaggctatccatggtcatcttggagattctggtcagggaggagctgaccatgtcaccagagatgaaggtgccccgctgctcgtaaaccatgaccctgtagattttaccgttgaaggccagcaagctcggctgcaggttctgattgtgaaagaaaaatcaatcttggggctcctaaatcactaaactaaaggaaaaagtcaagctggcaactgcttagggcaaacctgcctcccattctattcaaagtcacccctctggccaggcagcgtggtggctcatgcctataatcccagcactttgggaggctgaggctggtggttagccgggcctggtggtgcatgcctgtaatctcagctacttgggaggctgaggcaggagaatcacttgaacccgggtggtggaggttgcagtgagccaagatcatgccattacactccagcctgggtgacaagagggaaagtccctctcaaaaaacaaaaaacaagggccgggcgcggtggctcatgcctataatcctagcactttgggaggc[136 bp omitted]gaggcaagagaatggcgtgaacccagaaggcggagcttgcagtgagcagagatcacgccactgcactccagcctgggctacagagtaagactccgtctcaaaaaaaaaaaaaaaaaccccacaaaaaacaaaaaacaacaagaacaaagtccccacctgctcactgagatacctgcatatctgattggcctctttggagaggctaatcagaaactcaaaagaattcaagcatttgtctcttatctacctatgacctggaagacccttccctgtttccagttgtccctcctttccagaccgaaccaatgttcatcttgcatatgttgatctcatgtctccctaaaatgtataaaaccaagctgtgctctgaccacccttgggcacatgtcatcaggatctcctgagactgtgtcacatatacgtgt[136 bp omitted]catggcgaaacctcatctctactaaaaatacaaaaattagccaggtgtggtggcacatgcctgtaatcccatctactcaggaggctgaggcaggagaattgcttgaattcaagaggcggaggttgcagtgagctgagatcgcaccactgcactctagcctggggaatagagtgagactccgtctcaaaaaaaaaagaaaagtaaaaaataaaaaactaaattcactgagacccgcctctgatatttggggttcacatggacatgaatcatctctcccaggctgatctgcagggctctgtaactgcccagtgggttcactttgtcccctgcccagatagaatggatgtatcaagacaggagaattgcaacaaagagtttaattcatgcagagctggatgaacgggagactggagttttattttaattaattaattaattaatgtatttatccatctatcttgagttaagttcttgctctgttgcccaggctggagtgcagtggcaggatgataagttactgcagactccaactccctggctcaagtgatcctcccacctcagcctcctaggtagcgtgtgtggcttatgtctgtggtcccgctactctggaggctgaggcatgagaatcacttgaacccaggaggtggaggttgcagcgagccgagattgtgctactgcactccagcctgagtgagactcctt[141 bp omitted]aaaccccctctctactaaaaataaaaatacaaaaaaaaaaaaaaaattagccgggcatggcggcatgcgcctgtagtcccagctgctggggaggccgaggcaggagaatggcatgaacccgggaggc
